(19) United States
(12) Patent Application Publication
(10) Pub. No.: US 2023/0250156 A1
(43) Pub. Date: Aug. 10, 2023

(54) MULTIMERS FOR VIRAL STRAIN EVOLUTION

(71) Applicant: Quadrucept Bio Limited, London (GB)

(72) Inventors: Hanif ALI, London (GB); Jasper CLUBE, London (GB)

(21) Appl. No.: 17/909,621

(22) PCT Filed: Mar. 15, 2021
(86) PCT No.: PCT/EP2021/056576

§ 371 Date: Sep. 6, 2022

(30) Foreign Application Priority Data
Mar. 22, 2020 (GB) 2004153.9
Apr. 5, 2020 (GB) 2005008.4
May 16, 2020 (GB) 2007280.7
May 17, 2020 (GB) 2007286.4
Jun. 28, 2020 (GB) 2009847.1
Nov. 15, 2020 (GB) 2017966.9
Jan. 31, 2021 (GB) 2101331.3
Feb. 14, 2021 (GB) 2102057.3

(51) Int. Cl. C07K 16/10; G01N 33/569; A61K 9/00; A61K 39/42; A61K 45/06; A61P 31/14; C07K 14/725; A61K 38/17; C07K 14/55; A61K 38/20; C07K 16/28; A61K 39/395; C07K 16/24

(52) U.S. Cl. CPC C07K 16/10; A61K 9/0078; A61K 38/1774; A61K 38/2013; A61K 39/42; A61K 39/3955; A61K 45/06; A61P 31/14; C07K 14/55; C07K 14/7051; C07K 16/244; C07K 16/2827; C07K 16/2875; C07K 16/2878; C07K 16/2887; G01N 33/56983; A61K 2039/505; C07K 2317/569

(57) ABSTRACT

The invention relates to multimers such as multimers comprising 4 copies of a binding site or peptide; tetramers of polypeptides; and tetramers, octamers, dodecamers and hexadecamers of epitopes or effector domains, such as antigen binding sites (eg, antibody or TCR binding sites that specifically bind to antigen or pMHC, or variable domains thereof) or peptides such as incretin, insulin or hormone peptides. The invention also relates to methods and uses to expand antigen specificity of binding sites, as well as vaccines, methods of vaccination and assay methods and reagents.

### TECHNICAL FIELD

[0001] The invention relates to multimers, methods and uses to expand antigen specificity of binding sites, as well as vaccines, methods of vaccination and assay methods and reagents.

[0002] The invention also relates to multimers such as dimers or tetramers of polypeptides; and tetramers or higher-order multimers (eg, octamers, dodecamers and hexadecamers) of epitopes or effector domains, such as antigen binding sites (eg, antibody or TCR binding sites that specifically bind to antigen or pMHC, or variable domains thereof) or peptides such as incretin, insulin or hormone peptides.

### BACKGROUND

[0003] Multimers of effector domains have recognized utility in medical and non-medical applications for combining and multiplying the activity and presence of effector domains, eg, to provide for higher avidity of antigen binding (for effector domains that are antibody or TCR binding domains, for example) or for enhancing biological or binding activity, such as for providing bi- or multi-specific targeting or interaction with target ligands in vivo or in vitro.

[0004] Multimerisation domains which cause self-assembly of protein monomers into multimers are known in the art. Examples include domains found in transcription factors such as p53, p63 and p73, as well as domains found in ion channels such as TRP cation channels. The transcription factor p53 can be divided into different functional domains: an N-terminal transactivation domain, a proline-rich domain, a DNA-binding domain, a tetramerisation domain and a C-terminal regulatory region. The tetramerisation domain of human p53 extends from residues 325 to 356, and has a 4-helical bundle fold (Jeffrey et al., Science (New York, N.Y.) 1995, 267(5203): 1498-1502). The TRPM tetramerisation domain is a short anti-parallel coiled-coil tetramerisation domain of the transient receptor potential cation channel subfamily M member proteins 1-8. It is held together by extensive core packing and interstrand polar interactions (Fujiwara et al., Journal of Molecular Biology 2008, 383(4):854-870). Transient receptor potential (TRP) channels comprise a large family of tetrameric cation-selective ion channels that respond to diverse forms of sensory input. Another example is the potassium channel BTB domain. This domain can be found at the N terminus of voltage-gated potassium channel proteins, where represents a cytoplasmic tetramerisation domain (T1) involved in assembly of alpha-subunits into functional tetrameric channels (Bixby et al., Nature Structural Biology 1999, 6(1):38-43). This domain can also be found in proteins that are not potassium channels, like KCTD1 (potassium channel tetramerisation domain-containing protein 1; Ding et al., DNA and Cell Biology 2008, 27(5):257-265).

[0005] Multimeric antibody fragments have been produced using a variety of multimerisation techniques, including biotin, dHLX, ZIP and BAD domains, as well as p53 (Thie et al., Nature Boitech., 2009:26, 314-321). Biotin, which is efficient in production, is a bacterial protein which induces immune reactions in humans.

[0006] Human p53 (UniProtKB - P04637 (P53_HUMAN)) acts as a tumor suppressor in many tumor types, inducing growth arrest or apoptosis depending on the physiological circumstances and cell type. It is involved in cell cycle regulation as a trans-activator that acts to negatively regulate cell division by controlling a set of genes required for this process. Human p53 is found in increased amounts in a wide variety of transformed cells. It is frequently mutated or inactivated in about 60% of cancers. Human p53 defects are found in Barrett metaplasia a condition in which the normally stratified squamous epithelium of the lower esophagus is replaced by a metaplastic columnar epithelium. The condition develops as a complication in approximately 10% of patients with chronic gastroesophageal reflux disease and predisposes to the development of esophageal adenocarcinoma.

[0007] Nine isoforms of p53 naturally occur and are expressed in a wide range of normal tissues but in a tissue-dependent manner. Isoform 2 is expressed in most normal tissues but is not detected in brain, lung, prostate, muscle, fetal brain, spinal cord and fetal liver. Isoform 3 is expressed in most normal tissues but is not detected in lung, spleen, testis, fetal brain, spinal cord and fetal liver. Isoform 7 is expressed in most normal tissues but is not detected in prostate, uterus, skeletal muscle and breast. Isoform 8 is detected only in colon, bone marrow, testis, fetal brain and intestine. Isoform 9 is expressed in most normal tissues but is not detected in brain, heart, lung, fetal liver, salivary gland, breast or intestine.

### SUMMARY OF THE INVENTION

[0008] The invention provides; A protein multimer comprising 4 copies of a binding site, wherein the binding site is capable of binding to a virus spike protein of a coronavirus.

[0009] There is also provided:-
[0010] a pharmaceutical composition (eg, an inhalable pharmaceutical composition) comprising such a multimer;
[0011] an inhalation device (optionally a nebuliser or inhaler) comprising the composition;
[0012] a mixture of at least 2 different multimers wherein a first of said multimers comprises 4 copies of an antigen binding site that is capable of binding to a first spike antigen and a second of said multimers comprises 4 copies of an antigen binding site that is capable of binding to a second spike antigen, and the antigens are different;
[0013] a method of expanding the antigen binding specificity of a binding site, wherein the binding site binds or neutralises (eg, when administered to humans) a first antigen, but not a second antigen when the binding site is comprised in monovalent form by a protein that specifically binds to the first antigen, the method comprising providing a plurality of copies of a polypeptide, and multimerising at least 4 of the polypeptides to produce a multimer comprising at least 4 copies of the polypeptide, wherein the polypeptide comprises one, two or more copies of the binding site, whereby binding sites of the multimer are capable of binding the first and second antigens;
[0014] a multimer obtainable by said method of expanding wherein the multimer is for targeting a virus whose antigens evolve through mutation during viral infection of a human subject, optionally for treating a coronavirus infection;
[0015] a method of binding multiple copies of an antigen, the method comprising combining the copies with the multimer or composition, wherein the copies are bound by the multimer, and optionally the method comprising isolating the multimer bound to the antigen copies;
[0016] a method of detecting the presence of anti-first antigen antibodies in a bodily fluid sample of a human or animal, the method comprising carrying out an ELISA assay;
[0017] a method for detecting the presence of an antigen in a sample, the method comprising combining the sample with the multimer, allowing antigen in the sample to bind multimers to form antigen/multimer complexes and detecting antigen/multimer complexes;
[0018] a method of expanding a utility of an antigen binding site, the method comprising producing the multimer, wherein the multimer comprises at least 4 copies of the binding site;
[0019] a method for the treatment or prevention of a disease or condition in a human or animal subject), the method comprising administering to the subject a plurality of the multimers;
[0020] a multimer that is capable of binding to different forms of a virus spike protein for treating, preventing or reducing in a human or animal infection by a virus comprising a first form of spike protein, and for treating, preventing or reducing infection by a virus comprising a second form of the spike protein;
[0021] a multimer that is capable of binding to different forms of a virus spike protein for treating or preventing or reducing a seasonal viral infection in a human or animal; and
[0022] a medicament for administration to a human or animal subject for treating or preventing a seasonal virus, wherein the medicament comprises a plurality of the multimers, wherein the medicament comprises a pharmaceutically acceptable diluent, carrier or excipient.

[0023] The invention provides: A polypeptide comprising an antibody Fc region, wherein the Fc region comprises an antibody CH2 and an antibody CH3; and a self-associating multimerisation domain (SAM); wherein the CH2 comprises an antibody hinge sequence and is devoid of a core hinge region. Advantageously, the Fc does not directly pair with another Fc, which is useful for producing multimers by multimerization using SAM domains. For example, a benefit may be aiding desired multimer formation and/or enhancing multimer purity formed by such multimerization.

[0024] The invention also provides: A multimer of a plurality of antibody Fc regions, wherein each Fc is comprised by a respective polypeptide and is unpaired with another Fc region; optionally wherein the multimer is for medical use.

[0025] The invention also provides:-

### In a First Configuration

[0026] A protein multimer of at least first, second, third and fourth copies of an effector domain (eg, a protein domain or a peptide), wherein the multimer is multimerised by first, second, third and fourth self-associating tetramerisation domains (TDs) which are associated together, wherein each tetramerisation domain is comprised by a respective engineered polypeptide comprising one or more copies of said protein domain or peptide.

### In a Second Configuration

[0027] An isolated tetramer, octamer, dodecamer, hexadecamer or 20-mer of a TCR binding site, insulin peptide, incretin peptide or peptide hormone; or a plurality of said tetramers or octamers.

[0028] An isolated tetramer, octamer, dodecamer, hexadecamer or 20-mer of an antibody binding site or an antibody variable domain (eg, a single variable domain); or a plurality of said tetramers or octamers.

[0029] In an example the tetramer or octamer is soluble in aqueous solution (eg, aqueous eukaryotic cell culture medium). In an example the tetramer or octamer is expressible in a eukaryotic cell. Exemplification is provided below.

### In a Third Configuration

[0030] A tetramer, octamer, dodecamer, hexadecamer or 20-mer (eg, a tetramer or octamer) of
[0031] (a) TCR V domains or TCR binding sites, wherein the tetramer or octamer is soluble in aqueous solution (eg, an aqueous eukaryotic cell growth medium or buffer);
[0032] (b) antibody single variable domains, wherein the tetramer or octamer is soluble in aqueous solution (eg, an aqueous eukaryotic cell growth medium or buffer);
[0033] (c) TCR V domains or TCR binding sites, wherein the tetramer or octamer is capable of being intracellularly and/or extracellularly expressed by HEK293 cells; or
[0034] (d) antibody variable domains (eg, antibody single variable domains), wherein the tetramer or octamer is capable of being intracellularly and/or extracellularly expressed by HEK293 cells.

### In a Fourth Configuration

[0035] An engineered polypeitide or monomer of a multimer, tetramer, octamer, dodecamer, hexadecamer or 20-mer (eg, a tetramer or octamer) of the invention.

### In a Fifth Configuration

[0036] An engineered (and optionally isolated) engineered polypeptide (P1) which comprises (in N- to C-terminal direction):-
[0037] (a) TCR V1-TCR C1 - antibody CH1 (eg, IgG CH1) - optional linker - TD, wherein
   [0038] (i) V1 is a Vα and C1 is a Cα;
   [0039] (ii) V1 is a Vβ and C1 is a Cβ;
   [0040] (iii) V1 is a Vγ and C1 is a Cy; or
   [0041] (iv) V1 is a Vδ and C1 is a Cδ;
   or
[0042] (b) TCR V1 - antibody CH1 (eg, IgG CH1) - optional linker - TD, wherein
   [0043] (i) V1 is a Vα;
   [0044] (ii) V1 is a Vβ;
   [0045] (iii) V1 is a Vy; or
   [0046] (iv) V1 is a Vδ;
   or
[0047] (c) antibody V1 - antibody CH1 (eg, IgG CH1) - optional linker - TD, wherein
   [0048] (i) V1 is a VH; or
   [0049] (ii) V1 is a VL (eg, a Vλ, or a Vκ);
   or
[0050] (d) antibody V1 - optional antibody CH1 (eg, IgG CH1) - antibody Fc (eg, an IgG Fc) - optional linker - TD, wherein
   [0051] (i) V1 is a VH; or
   [0052] (ii) V1 is a VL (eg, a Vλ or a Vκ);
   or
[0053] (e) antibody V1 - antibody CL (eg, a Cλ or a Cκ) - optional linker - TD, wherein
   [0054] (i) V1 is a VH; or
   [0055] (ii) V1 is a VL (eg, a Vλ or a Vκ);
   or
[0056] (f) TCR V1 -TCR C1 - optional linker - TD, wherein
   [0057] (i) V1 is a Vα and C1 is a Cα;
   [0058] (ii) V1 is a Vβ and C1 is a Cβ;
   [0059] (iii) V1 is a Vγ and C1 is a Cy; or
   [0060] (iv) V1 is a Vδ and C1 is a Cδ.

### In a Sixth Configuration

[0061] A nucleic acid encoding an engineered polypeptide or monomer of the invention, optionally wherein the nucleic acid is comprised by an expression vector for expressing the polypeptide.

### In a Seventh Configuration

[0062] Use of a nucleic acid or vector of the invention in a method of manufacture of protein multimers for producing intracellularly expressed and/or secreted multimers, wherein the method comprises expressing the multimers in and/or secreting the multimers from eukaryotic cells comprising the nucleic acid or vector.

### In an Eighth Configuration

[0063] A method producing
[0064] (a) TCR V domain multimers, the method comprising the soluble and/or intracellular expression of TCR V-TD (eg, NHR2 TD or TCR V- p53 TD) fusion proteins expressed in eukaryotic cells, the method optionally comprising isolating a plurality of said multimers;
[0065] (b) antibody V domain multimers, the method comprising the soluble and/or intracellular expression of antibody V (eg, a single variable domain)-TD (eg, V-NHR2 TD or V- p53 TD) fusion proteins expressed in eukaryotic cells, the method optionally comprising isolating a plurality of said multimers;
[0066] (c) incretin peptide (eg, GLP-1, GIP or insulin) multimers, the method comprising the soluble and/or intracellular expression of incretin peptide-TD (eg, incretin peptide-NHR2 TD or incretin peptide-p53 TD) fusion proteins expressed in eukaryotic cells, such as HEK293T cells; the method optionally comprising isolating a plurality of said multimers; or
[0067] (d) peptide hormone multimers, the method comprising the soluble and/or intracellular expression of peptide hormone-TD (eg, peptide hormone-NHR2 TD or peptide hormone- p53 TD) fusion proteins expressed in eukaryotic cells, such as HEK293T cells; the method optionally comprising isolating a plurality of said multimers.

### In a Ninth Configuration

[0068] Use of a nucleic acid or vector of the invention in a method of manufacture of protein multimers for producing glycosylated multimers in eukaryotic cells comprising the nucleic acid or vector.

### In a Tenth Configuration

[0069] Use of self-associating tetramerisation domains (TD) (eg, NHR2 TD, p53 TD, p63 TD or p73 TD or a homologue or orthologue thereof) in a method of the manufacture of a tetramer of polypeptides, for producing a higher yield of tetramers versus monomer and/or dimer polypeptides.

### In an Eleventh Configuration

[0070] Use of an engineered polypeptide in a method of the manufacture of a tetramer of a polypeptide comprising multiple copies of a protein domain or peptide, for producing a higher yield of tetramers versus monomer and/or dimer polypeptides, wherein the engineered polypeptide comprises one or more copies of said protein domain or peptide and further comprises a self-associating tetramerisation domains (TD) (eg, NHR2 TD, p53 TD, p63 TD or p73 TD or a homologue or orthologue).

### In a Twelfth Configuration

[0071] Use of self-associating tetramerisation domains (TD) (eg, NHR2 TD, p53 TD, p63 TD or p73 TD or a homologue or orthologue thereof) in a method of the manufacture of a tetramer of a polypeptide, for producing a plurality of tetramers that are not in mixture with monomers, dimers or trimers.

### In a Thirteenth Configuration

[0072] A eukaryotic host cell comprising the nucleic acid or vector for intracellular and/or secreted expression of the multimer, tetramer, octamer, dodecamer, hexadecamer or 20-mer (eg, tetramer, octamer), engineered polypeptide or monomer of the invention.

### In a Fourteenth Configuration

[0073] Use of an engineered polypeptide in a method of the manufacture of a tetramer of a polypeptide comprising multiple copies of a protein domain or peptide, for producing a plurality of tetramers that are not in mixture with monomers, dimers or trimers, wherein the engineered polypeptide comprises one or more copies of said protein domain or peptide and further comprises a self-associating tetramerisation domains (TD) (eg, NHR2 TD, p53 TD, p63 TD or p73 TD or a homologue or orthologue).

### In a Fifteenth Configuration

[0074] A multivalent heterodimeric soluble T cell receptor capable of binding pMHC complex comprising:
[0075] (i) TCR extracellular domains;
[0076] (ii) immunoglobulin constant domains; and
[0077] (iii) an NHR2 multimerisation domain of ETO.

### In a Sixteenth Configuration

[0078] A multimeric immunoglobulin, comprising
[0079] (i) immunoglobulin variable domains; and
[0080] (ii) an NHR2 multimerisation domain of ETO.

### In a Seventeenth Configuration

[0081] method for assembling a soluble, multimeric polypeptide, comprising:
[0082] (a) providing a monomer of the said multimeric polypeptide, fused to an NHR2 domain of ETO;
[0083] (b) causing multiple copies of said monomer to associate, thereby obtaining a multimeric, soluble polypeptide.

### In an Eighteenth Configuration

[0084] A mixture comprising (i) a cell line (eg, a eukaryotic, mammalian cell line, eg, a HEK293, CHO or Cos cell line) encoding a polypeptide of the invention; and (ii) tetramers of the invention.

### In a Ninteenth Configuration

[0085] A method for enhancing the yield of tetramers of an protein effector domain (eg, an antibody variable domain or binding site), the method comprising expressing from a cell line (eg, a mammalian cell, CHO, HEK293 or Cos cell line) tetramers of a polypeptide, wherein the polypeptide is a polypeptide of the invention and comprises one or more effector domains; and optionally isolating said expressed tetramers.

### In a Twentieth Configuration

[0086] A polypeptide comprising (in N- to C-terminal direction; or in C- to N-terminal direction)
[0087] (i) An immunoglobulin superfamily domain;
[0088] (ii) An optional linker; and
[0089] (iii) A self-associating multimerisation domain (SAM) (optionally a self-associating tetramerisation domain (TD)).

### In a Twenty-First Configuration

[0090] A method of expanding the antigen binding specificity of a binding site, wherein the binding site binds a first antigen, but not a second antigen (eg, when administered to humans) when the binding site is comprised in monovalent or bivalent form by a protein that specifically binds to the first antigen, the method comprising providing a plurality of copies of a polypeptide of the invention, and multimerising at least 4 of the polypeptides to produce a multimer comprising at least 4 copies of the polypeptide, wherein the polypeptide comprises one, two or more copies of the binding site, whereby binding sites of the multimer are capable of binding the first and second antigens.

### In a Twenty-Second Configuration

[0091] Use of a polyepeptide of the invention in a method of manufacturing a multimer for expanding the antigen binding specificity of a binding site, wherein the binding site binds a first antigen, but not a second antigen (eg, when administered to humans) when the binding site is comprised in monovalent or bivalent form by a protein that specifically binds to the first antigen, wherein the method comprises providing a plurality of copies of a polypeptide of the invention, and multimerising at least 4 of the polypeptides to produce a multimer comprising at least 4 copies of the polypeptide, wherein the polypeptide comprises one, two or more copies of the binding site, whereby binding sites of the multimer are capable of binding the first and second antigens.

[0092] In an embodiment, the polypeptide comprises aspects useful for treating or preventing a viral infection or cancer wherein the polypeptide comprises
[0093] A: one or more epitope binding sites, optionally wherein the binding site binds to (i) a SARS-Cov-2 antigen (eg, a SARS-Cov-1 antigen and a SARS-Cov-2 antigen); (ii) BCMA (B-cell maturation antigen) and TACI (transmembrane activator and calcium modulator and cyclophilin ligand interactor); (iii) first and second Coronovirus antigens; (iv) first and second HIV antigens; (v) first and second P falciparum antigens; (vi) first and second Salmonella antigens; (vii) a TMPRSS protein (eg, a TMPRSS2 antigen); or (viii) a ACE2 antigen; or
[0094] B: one, two or more copies of an ACE2 peptide (eg, an ACE2 extracellular domain) and/or a TMPRSS2 peptide (eg, a TMPRSS protein extracellular domain); or
[0095] C: a first binding site that binds to a Coronavirus antigen (eg, a SARS-Covantigen, preferably a SARS-Cov-1 or -2 antigen) and one or more copies of an ACE2 peptide (eg, an ACE2 extracellular domain) and/or a TMPRSS2 peptide (eg, a TMPRSS protein extracellular domain); or
[0096] D: a first binding site that binds to a ACE2 extracellular domain; and one or more copies of an ACE2 peptide (eg, an ACE2 extracellular domain) and/or a TMPRSS2 peptide (eg, a TMPRSS protein extracellular domain); or
[0097] E: a first binding site that binds to a TMPRSS2 peptide extracellular domain; and one or more copies of an ACE2 peptide (eg, an ACE2 extracellular domain) and/or a TMPRSS2 peptide (eg, a TMPRSS protein extracellular domain).

[0098] The invention also provides:
[0099] A protein multimer comprising more than 2 copies of a binding site, wherein the binding site is capable of binding to a first antigen, optionally wherein the multimer is capable of binding to the first antigen and a second antigen, wherein the antigens are different.
[0100] For example, the multimer comprises from 4 to 32 (eg, from 4 to 24, or from 4 to 20, or from 4 to 16) copies of the binding site, ie, this means that the multimer does not comprise any more or less than said number. In an embodiment, the multimer comprises, 4, 5, 6, 7, 8, 9, 10, 11, 12, 13, 14, 15, 16, 17, 18, 19, 20, 21, 22, 23, 24, 25, 26, 27, 28, 29, 30, 31 or 32 copies of the binding site.
[0101] For example, the multimer contains from 4 to 32 (eg, from 4 to 24, or from 4 to 20, or from 4 to 16) copies of the binding site, ie, this means that the multimer does not contain any more or less than said number. In an embodiment, the multimer contains, 4, 5, 6, 7, 8, 9, 10, 11, 12, 13, 14, 15, 16, 17, 18, 19, 20, 21, 22, 23, 24, 25, 26, 27, 28, 29, 30, 31 or 32 copies of the binding site.
[0102] In an embodiment, a control protein multimer comprising 1 or 2 (but no more than 1 or 2 respectively) of said binding sites is not capable of binding to the first antigen; or is capable of binding to the first antigen, but not to the second antigen. Binding may be determined by an ELISA assay, such as by determining OD₄₅₀, for example in an ELISA assay described herein.
[0103] An aspect provides: A protein multimer comprising more than 2 copies of a binding site, wherein the binding site is capable of binding to a virus spike protein of a first virus, optionally wherein the multimer is capable of binding to the first and a second virus, wherein the viruses are different. This is exemplified herein for 2 different viruses.
[0104] An aspect provides:-A method for detecting the presence of an antigen in a sample, the method comprising combining the sample with a multimer of the invention, allowing antigen in the sample to bind multimers to form antigen/multimer complexes and detecting antigen/multimer complexes.
[0105] A method of expanding a utility of an antigen (eg, a protein) binding site, the method comprising producing a multimer of the invention, wherein the multimer comprises a plurality of copies (eg, at least 4 or 8 copies) of the binding site.

[0106] The invention also provides a pharmaceutical composition, cosmetic, foodstuff, beverage, cleaning product, detergent comprising the multimer(s), tetramer, octamer, dodecamer, hexadecamer or 20-mer (eg, tetramer(s) or octamer(s)) of the invention.

[0107] A multimer herein is, eg, a dimer, trimer, tetramer, octamer, dodecamer, hexadecamer or 20-mer.

[0108] As demonstrated in Example 22, dodecamer and hexadecamer multimers surprisingly display a very high functional affinity for antigen binding due to the increasing avidity effect. The functional affinity for these going from 8 to 12 binding sites (compare Tables 15 and 16) or from 8 to 16 binding sites is much more than additive; a synergistic increase is seen as a result of enhanced avidity. Thus, in one embodiment, a multimer which is 12-valent for an antigen (ie, a dodecamer as described herein) is preferred; in another embodiment a multimer which is 16-valent for an antigen (ie, hexadecamer as described herein) is preferred.

[0109] Thus, a further configuration of the invention provides:
[0110] A protein multimer comprising or containing 4 copies of a peptide or an antigen binding site, (optionally wherein the antigen is a virus spike protein of a first virus, optionally wherein the multimer is capable of binding to the first and a second virus, wherein the viruses are different).
[0111] A protein multimer comprising or containing 8 copies of a peptide or an antigen binding site, (optionally wherein the antigen is a virus spike protein of a first virus, optionally wherein the multimer is capable of binding to the first and a second virus, wherein the viruses are different).
[0112] A protein multimer comprising or containing 12 copies of a peptide or an antigen binding site, (optionally wherein the antigen is a virus spike protein of a first virus, optionally wherein the multimer is capable of binding to the first and a second virus, wherein the viruses are different).
[0113] A protein multimer comprising or containing 16 copies of a peptide or an antigen binding site, (optionally wherein the antigen is a virus spike protein of a first virus, optionally wherein the multimer is capable of binding to the first and a second virus, wherein the viruses are different).
[0114] A protein multimer comprising or containing 20 copies of a peptide or an antigen binding site, (optionally wherein the antigen is a virus spike protein of a first virus, optionally wherein the multimer is capable of binding to the first and a second virus, wherein the viruses are different).
[0115] A protein multimer comprising or containing 24 copies of a peptide or an antigen binding site, (optionally wherein the antigen is a virus spike protein of a first virus, optionally wherein the multimer is capable of binding to the first and a second virus, wherein the viruses are different).

### In a Twenty-Third Configuration

[0116] As demonstrated in Example 32, multimers comprising 4 copies of an antigen binding site of REGN10987, REGN10933 or CB6 surprisingly display much improved neutralization potency of the Quad formats over the parental IgG format (FIG. 61-J), with a a 600-fold improvement in neutralization potency over the parental mAb being surprisingly achieved. Thus, the present configuration provides:
[0117] A protein multimer comprising 4 copies of an antigen binding site of an antibody, wherein the antibody is selected from REGN10987, REGN10933 and CB6.
[0118] A protein multimer comprising 4 copies of an antigen binding site of an antibody, wherein the multimer comprises a dimer of an antibody or a fragment thereof (eg, a Fab), wherein the antibody is selected from REGN10987, REGN10933 and CB6.
[0119] A protein multimer comprising a dimer of an antibody or a fragment thereof (eg, a Fab), wherein the antibody is selected from REGN10987, REGN10933 and CB6.
[0120] Advantageously, the multimer may comprise mammalian cell glycosylation. The multimer may, for example, comprise 8, 12, 16, 20 or 24 copies of said binding site in certain aspects of the configuration.

### In a Twenty-Fourth Configuration

[0121] As demonstrated in Example 33, multimers comprising 4 copies of antigen binding domain Nb-112 (a VHH domain comprising the amino acid sequence of SEQ ID NO: 288) surprisingly display much improved neutralization potency of the Quad formats over the parental VHH format (FIGS. 62D & 62E), with a substantial improvement in neutralization potency over the parental VHH being surprisingly achieved. As demonstrated in Example 33, such multimers also surprisingly show substantially higher binding to protein A, which aids purification. Thus, the present configuration provides:
[0122] A protein multimer comprising 4 (and optionally no more than 4) copies of Nb-112 (SEQ ID NO: 288).
[0123] A protein multimer comprising 4 (and optionally no more than 4) copies of an antibody variable domain comprising the amino acid sequence SEQ ID NO: 288.
[0124] A protein multimer comprising 8 (and optionally no more than 8) copies of Nb-112 (SEQ ID NO: 288).
[0125] A protein multimer comprising 8 (and optionally no more than 8) copies of an antibody variable domain comprising the amino acid sequence SEQ ID NO: 288.
[0126] A protein multimer comprising 12 (and optionally no more than 12) copies of Nb-112 (SEQ ID NO: 288).
[0127] A protein multimer comprising 12 (and optionally no more than 12) copies of an antibody variable domain comprising the amino acid sequence SEQ ID NO: 288.
[0128] A protein multimer comprising 16 (and optionally no more than 16) copies of Nb-112 (SEQ ID NO: 288).
[0129] A protein multimer comprising 16 (and optionally no more than 16) copies of an antibody variable domain comprising the amino acid sequence SEQ ID NO: 288.
[0130] A protein multimer comprising 20 (and optionally no more than 20) copies of Nb-112 (SEQ ID NO: 288).
[0131] A protein multimer comprising 20 (and optionally no more than 20) copies of an antibody variable domain comprising the amino acid sequence SEQ ID NO: 288.
[0132] A protein multimer comprising 24 (and optionally no more than 24) copies of Nb-112 (SEQ ID NO: 288).
[0133] A protein multimer comprising 24 (and optionally no more than 24) copies of an antibody variable domain comprising the amino acid sequence SEQ ID NO: 288.
[0134] A protein multimer comprising 28 (and optionally no more than 28) copies of Nb-112 (SEQ ID NO: 288).
[0135] A protein multimer comprising 28 (and optionally no more than 28) copies of an antibody variable domain comprising the amino acid sequence SEQ ID NO: 288.
[0136] Advantageously, the multimer may comprise mammalian cell glycosylation.

### In a Twenty-Fifth Configuration

[0137] A method of purifying a multimer of the invention from a composition comprising the multimer, the method comprising contacting the composition with an antigen (eg, a supergantigen) and binding the multimer to the antigen, and optionally isolating antigen/multimer complexes.

[0138] The multimer may be obtained from the complexes.

[0139] Preferably, the multimer comprises at least 4 copies (eg, 4, 8, 12, 16, 20, 24 or 28 copies) of a VH3 family domain and the superantigen is Protein A. Preferably, the multimer comprises at least 4 copies (eg, 4, 8, 12, 16, 20, 24 or 28 copies) of a Vκ domain and the superantigen is Protein L.

### In a Twenty-Sixth Configuration

[0140] The polypeptide described herein may, for example, comprise binding domain QB-GB or a binding domain (eg, an antibody single variable domain) that competes with QB-GB for binding to SARS-CoV-2 spike in an in vitro competition assay.

[0141] The polypeptide described herein may, for example, comprise binding domain QB-GB or a binding domain (eg, an antibody single variable domain) that binds to the same SARS-CoV-2 spike epitope (or an overlapping epitope) as QB-GB.

[0142] The polypeptide described herein may, for example, comprise a binding domain that binds to the inner face of the RBD (receptor-binding domain) of SARS-CoV-2 spike.

[0143] The polypeptide described herein may, for example, comprise a binding domain that binds to the inner face of the RBD (receptor-binding domain) of SARS-CoV-2 spike that is in the up state.

[0144] Similarly, the multimer herein may comprise copies of such a binding domain. The multimer described herein may, for example, bind to the inner face of the RBD (receptor-binding domain) of SARS-CoV-2 spike. The multimer described herein may, for example, bind to the inner face of the RBD (receptor-binding domain) of SARS-CoV-2 spike that is in the up state.

[0145] As explained in Example 37 Quad multimers that have such features have been found to be highly advantageous and may be more resistant to receptor-driven selection pressure associated with SARS-Cov-2 mutation.

[0146] The invention also provides polypeptide dimers, as well as tetramers of dimers.

### BRIEF DESCRIPTION OF THE DRAWINGS

[0147] FIG. 1: A schematic drawing representing the stepwise self-assembly of a tetravalent heterodimeric soluble TCR protein complex via a monomer and homodimer, which is aided by NHR2 tetramerisation domain.

[0148] FIG. 2: A schematic drawing representing the stepwise self-assembly of an octavalent heterodimeric soluble TCR protein complex via a monomer² and homodimer², which is aided by NHR2 tetramerisation domain and immunoglobulin hinge domain.

[0149] FIG. 3: A schematic drawing of the domain arrangements in the α and β chain used for expressing and assembling ts-NY-ESO-1 TCR.

[0150] FIG. 4: A schematic drawing of the domain arrangements in the α and β chain used for expressing and assembling os-NY-ESO-1 TCR.

[0151] FIG. 5: Amino acid sequence of the α and β chain of the ts-NY-ESO-1 TCR protein complex. Amino acid sequences of alternate domains are underlined.

[0152] FIG. 6: Amino acid sequence of the α and β chain of the os-NY-ESO-1 TCR protein complex. Amino acid sequences of alternate domains are underlined.

[0153] FIG. 7: A schematic drawing of the domain arrangements in the α and β chain used for expressing and assembling ts-NY-ESO-1 TCR-IL2 fusion protein complex.

[0154] FIG. 8: A schematic drawing of the domain arrangements in the α and β chain used for expressing and assembling os-NY-ESO-1 TCR-IL2 fusion protein complex.

[0155] FIG. 9: Amino acid sequence of the α and β chain of the ts-NY-ESO-1 TCR-IL2 fusion protein complex. Amino acid sequences of alternate domains are underlined.

[0156] FIG. 10: Amino acid sequence of the α and β chain of the os-NY-ESO-1 TCR-IL2 fusion protein complex. Amino acid sequences of alternate domains are underlined.

[0157] FIG. 11A: A schematic drawing representing the stepwise self-assembly of a tetravalent single domain antibody (dAb) complex via a monomer and homodimer, which is aided by NHR2 tetramerisation domain.

[0158] FIG. 11B: A schematic drawing of the domain arrangements for assembly of tetravalent dAbs, including linker and NHR2 domains.

[0159] FIG. 12A: A schematic drawing representing the stepwise self-assembly of a tetravalent Fab complex via a monomer and homodimer, which is aided by NHR2 tetramerisation domain.

[0160] FIG. 12B: A schematic drawing of the domain arrangements for assembly of tetravalent Fabs, including linker and NHR2 domains in the heavy chain, and light chain variable and constant domains.

[0161] FIG. 13A: A schematic drawing representing the stepwise self-assembly of an octavalent Fab complex via a monomer and homodimer, which is aided by NHR2 tetramerisation domain and an antibody hinge region linked to CH1 domain.

[0162] FIG. 13B: A schematic drawing of the domain arrangements for assembly of octavalent Fabs, including hinge, linker and NHR2 domains in the heavy chain, and light chain variable and constant domains.

[0163] FIG. 14: is a schematic of Quad 16 and Quad 17.

[0164] FIG. 15: shows (A) Quad 16 and (B) Quad 17 monomer sequences and configuration.

[0165] FIG. 16: shows analysis of secreted proteins using anti-Ig Western Blot: (A) a PAGE gel under SDS denatured conditions - 16=Quad16; 17=Quad17; and (B) a PAGE gel under native (ie, non-denatured) conditions - 16=Quad16; 17=Quad17.

[0166] FIG. 17: Western blots prepared from denaturing SDS-PAGE gel probed with anti-human IgG HRP detection antibody (A) Protein samples from Quads 3 and 4 were prepared from whole cell extracts and loaded in lanes 1 and 2 respectively. The expected Mw for Quads 3 and 4 are 46.1 and 46.4 kDa respectively. (B) Protein samples from Quads 12 and 13 were prepared from whole cell extracts and loaded in lanes 1 and 2 respectively. The expected Mw for Quads 12 and 13 are 47.8 and 48.1 kDa respectively.

[0167] FIG. 18: Western blots prepared from denaturing SDS-PAGE gel probed with anti-human IgG HRP detection antibody (A) Protein samples from Quads 3 and 4 were prepared by concentrating cell supernatant and loaded in lanes 1 and 2 respectively. The expected Mw for Quads 3 and 4 are 46.1 and 46.4 kDa respectively. (B) Protein samples from Quads 12 and 13 were prepared by concentrating cell supernatant and loaded in lanes 1 and 2 respectively. The expected Mw for Quads 12 and 13 are 47.8 and 48.1 kDa respectively.

[0168] FIG. 19: Western blots prepared from denaturing SDS-PAGE gel probed with anti-HIS HRP detection antibody (A) Protein samples from Quads 14, 15, 18 and 19 were prepared from whole cell extracts and loaded in lanes 1-4, respectively. The expected Mw for Quads 14, 15, 18 and 19 are 22.0, 22.3, 37.4 and 37.7 kDa respectively. (B) Protein samples from Quads 23, 24, 26 and 27 were prepared from whole cell extracts and loaded in lanes 1-4, respectively. The expected Mw for Quads 23, 24, 26 and 27 are 32.1, 32.4, 33.7 and 34.0 kDa respectively. (C) Protein samples from Quads 34, and 38 were prepared from whole cell extracts and loaded in lanes 1-2, respectively. The expected Mw for Quads 34, and 38 are 25.5 and 25.4 kDa respectively. (D) Protein samples from Quads 40, 42, 44 and 46 were prepared from whole cell extracts and loaded in lanes 1-4, respectively. The expected Mw for Quads 40, 42, 44 and 46 are 25.4, 37.6, 25.5 and 38.0 kDa respectively. Lane U contains concentrated serum prepared from untransfected HEK293T cells (negative control) and C is a His-tagged protein used as a positive control for the anti-His HRP detection antibody. Serum anti-His background band is highlighted by a black arrow, which can be consistently detected in all for blots.

[0169] FIG. 20: Western blot prepared from denaturing SDS-PAGE gel (A) and probed with anti-human IgG HRP detection antibody. Protein samples from Quads 14 and 15 were prepared from whole cell extracts and loaded in lanes 1 and 2, respectively. The expected Mw for Quads 14 and 15 are 22.0 and 22.3 kDa respectively. (B) Western blot prepared from Native PAGE gels and probed with anti-human IgG HRP detection antibody. Lanes 1 and 2 contains protein samples from Quads 14 and 15 prepared from whole cell extract.

[0170] FIG. 21: Quad polyeptides fused to leader and tag sequences. Where linker is present, the linker is G4S (only 1 G4S). * denotes TCR constant domains with introduced cysteine residue allowing S-S bond formation between TCR alpha and beta chain. Human IgG1 hinge was used. All C regions are human. The TCR V domains are specific for NY-ESO-1. GFP=green fluorescent protein.

[0171] FIG. 22: Schematic representations of the multimeric structure of Quad formats A - AC. The description and the monomeric building block from which the tetravalent Quad molecules are assembled from are described in Table 8.

[0172] FIG. 23: SDS-PAGE analysis of monospecific tetravalent dAb Quad 57 protein purified from culture supernatant. Quad protein migrated according to its expected MW as indicated by the arrow with no visible impurities.

[0173] FIG. 24: SDS-PAGE analysis of bispecific tetravalent dAb Quad 54 protein purified from culture supernatant (A). Quad protein migrated according to its expected MW as indicated by the arrow with no visible impurities (B) Direct binding ELISA using serially diluted Quad 54 protein with a fixed concentration of recombinant TNFa protein coated on plate. Quad 54 binds TNFa protein in a dose-dependent manner.

[0174] FIG. 25: SDS-PAGE analysis of monospecific tetravalent scFv Quads. Quads 51 and 63 proteins purified from culture supernatant and analysed by SDS-PAGE (A). Quad proteins migrated according to their expected MW as indicated by the arrows with no visible impurities (B) Direct binding ELISA using serially diluted Quad 51 and 63 proteins with a fixed concentration of recombinant TNFa protein coated on plate. Both Quads 51 and 63 bind TNFa protein with similar binding strength in a dose-dependent manner. (C) SDS-PAGE analysis of W51ScFv monovalent anti-TNFa control protein. (D) Western blot analysis of TNFa-mediated Caspase-3 signaling in the presence of Quad 51, Humira (Hum) and W51 ScFv. Culture medium (CM) alone or with actinomycin D (AD) were used as a negative control. The detection antibody used for each blot is indicated next to each blots. The Western blots detected by anti-Tubulin represents internal loading control. (E) SDS-PAGE analysis of Quad 53 Tet protein purified from culture supernatant. The Quad protein migrated according to its expected MW as indicated by the arrow. (F). Direct binding ELISA using serially diluted Quad 53 Tet protein with a fixed concentration of recombinant CD20 protein coated on plate. Quad 53 Tet binds CD20 protein in a dose-dependent manner.

[0175] FIG. 26: SDS-PAGE analysis of monospecific octavalent scFv Quad 53 protein purified from culture supernatant (A). Quad protein migrated according to its expected MW as indicated by the arrow with no visible impurities (B) Direct binding ELISA using serially diluted Quad 53 Oct protein with a fixed concentration of recombinant CD20 protein coated on plate. Quad 53 Oct binds CD20 protein in a dose-dependent manner. (C) Monovalent, tetravalent and octavalent version of Quad 53 analysed by SDS-PAGE. (D) Direct binding ELISA comparing binding strength of monovalent, tetravalent and octavalent version of Quad 53 to recombinant CD20. An increasing in binding strength can be seen with increasing valency of Quad 53.

[0176] FIG. 27: SDS-PAGE analysis of bispecific tetravalent scFv Quad 55 protein purified from culture supernatant (A). Quad protein migrated according to its expected MW as indicated by the arrow with no visible impurities (B) Direct binding ELISA using serially diluted Quad 55 protein with a fixed concentration of recombinant TNFa protein coated on plate. Quad 55 binds TNFa protein in a dose-dependent manner.

[0177] FIG. 28: SDS-PAGE analysis of bispecific tetravalent Quads. Bispecific scFv x dAb Quad 56 protein purified from culture supernatant and analysed by SDS-PAGE (A). Quad protein migrated according to its expected MW as indicated by the arrow with no visible impurities (B) Direct binding ELISA using serially diluted Quad 56 protein with a fixed concentration of recombinant TNFa protein coated on plate. Quad 56 binds TNFa protein in a dose-dependent manner. (C) Direct binding ELISA comparing binding strength of three different bispecific tetravalent Quad formats (Quad 54: dAb x dAb, Quad 55: scFv x scFv and Quad 56: ScFv x dAb) to recombinant CD20. All three bispecific tetravalent Quad formats bind CD20 with similar binding strength and in a dose-dependent manner.

[0178] FIG. 29: SDS-PAGE analysis of monospecific tetravalent monomeric Ig scFv Quad 64 version 1 protein purified from culture supernatant (A). “Mononomeric Ig” refers to a multimer of a polypeptide of the invention that comprises an Fc, wherein CH2 comprises a hinge sequence but lacks a core hinge region; this advantageously prevents Fc regions from multimerizing together so that the multimerization is instead brought about by the SAM (eg, TD) domains of polypeptides in the multimer. Quad protein migrated according to its expected MW as indicated by the arrow with no visible impurities (B) Direct binding ELISA using serially diluted Quad 64 protein with a fixed concentration of recombinant CD20 protein coated on plate. Quad 64 binds CD20 protein in a dose-dependent manner.

[0179] FIG. 30: SDS-PAGE analysis of monospecific tetravalent monomeric Ig scFv Quad 65 version 2 protein purified from culture supernatant (A). Quad protein migrated according to its expected MW as indicated by the arrow with no visible impurities (B) Direct binding ELISA using serially diluted Quad 65 protein with a fixed concentration of recombinant CD20 protein coated on plate. Quad 65 binds CD20 protein in a dose-dependent manner.

[0180] FIG. 31: Schematic representation of Quad 68 and Quad 69 (A & B). The specificity of dAbs for PD-L1 and 4-1BB is indicated by arrows. (C & D) SDS-PAGE analysis of Quad 68 and Quad 69 protein purified from culture supernatant. Quad proteins migrated according to their expected MW as indicated by the arrows with no visible impurities.

[0181] FIG. 32: Alignment of p53 tetramerisation domain (TD) from different species. Sequence variations from human TD are highlighted in bold and underlined.

[0182] FIG. 33. Schematic representation of the molecular (A) and structural (B & C) arrangements of tetravalent and octavalent anti-TNF alpha dAb monomeric Ig Quads. Purified Quad proteins were analysed by SDS-PAGE (D). The tetravalent and octavalent Quad proteins migrated according to the expected molecular weight as indicated with no visible impurities. The core hinge region was removed in these formats and this is indicated in the figures with either a * or as CH2′. The Q92 chain contains a His-tag located at the C-terminus, which is not shown in the figure.

[0183] FIG. 34. SDS-PAGE analysis of octavalent bispecific anti-PDL1/4-1BB dAb monomeric Ig Quad (A) and octavalent monospecific anti-PDL1 dAb monomeric Ig Quad (B) proteins purified from culture supernatant. Quad proteins migrated according to their expected molecular weight as indicated by the arrow with no visible impurities.

[0184] FIG. 35. SDS-PAGE analysis of avelumab Fab monomeric Ig Quad (A) and Humira Fab monomeric Ig Quad (B) proteins purified from culture supernatant. Quad proteins migrated according to their expected molecular weight as indicated by the arrow with no visible impurities. Humira (adalimumab) Fab monomeric Ig Quad was further analysed by SEC where the fully assembled tetrameric protein eluted as a single peak at the expected molecular weight (315.8 kDa) with no visible detection of the dimeric or monomeric form.

[0185] FIG. 36. Schematic representation of the structural arrangements of aflibercept monomeric Ig Quad (Q96). The * denotes the hinge region is divoid of the core hinge region. Q96 Quad protein was analysed by SDS-PAGE where a single protein band at the expected molecular weight can be seen (B). Binding profile of Q96 to VEGF-A was analysed by ELISA binding assay where a dose-dependent binding can be seen.

[0186] FIG. 37. Schematic representation of the molecular arrangements of monovalent, tetravalent and octavalent anti-TNF alpha dAb Quads (A). All constructs contain a His-tag located at the C-terminus, which is not shown in the figure. Purified Quad proteins were analysed by SDS-PAGE where a single protein band at the expected molecular weight for monovalent, tetravalent and octavalent versions (Lanes 1-3 respectively) can be seen (B). TNF alpha binding assay using Q88 monovalent, tetravalent and octavalent Quad proteins (C) in addition to Q92 and Q92+Q93 (D) Quad proteins were performed by ELISA where a dose-dependent binding can be seen. The respective TNF alpha neutralization potency of the Quad proteins were analysed using WEHI cell-based bioassay (E & F, respectively). Enhancement in TNF alpha neutralization potency can be seen in Quads with increasing number of anti-TNF alpha dAb binding domains.

[0187] FIG. 38. Schematic representation of the molecular (A) and structural (B) arrangements of dodeca and hexadeca anti-TNF alpha dAb multimers (we alternatively call multimers, Quads). The light chain constant region is denoted by CL, which could comprise of either kappa constant region or lambda constant region. The Q142 construct contains a His-tag located at the C-terminus, which is not shown in the figure. Purified Quad proteins were analysed by SDS-PAGE (C). Dodeca valent anti-TNF alpha dAb Quads with either lambda (lane 1) or kappa (lane 2) constant region migrated on the SDS-PAGE gel according to the expected molecular weight. Hexadeca valent anti-TNF alpha dAb Quads with either lambda (lane 3) or kappa (lane 4) constant region also migrated on the SDS-PAGE gel according to the expected molecular weight. The TNF alpha neutralization potency of the dodeca and hexadeca anti-TNF alpha dAb Quad proteins with either kappa (D) or lambda (E) light chain constant region where analysed using WEHI cell-based bioassay. Potency enhancement with increasing anti-TNF alpha dAb binding domains can be seen.

[0188] FIG. 39. Schematic structural representation of dodeca-valent trispecific (A) and hexadeca-valent tetraspecific (B) multimers. For each format, the schematic structure of the monomeric building block is also shown. The regions within these molecules containing optional flexible linkers are indicated with arrows. The CL domain could be either a kappa or lambda C region. The dodeca-valent trispecific Quad contains three different dAbs labeled 1-3, which can bind either three different antigens on three different cells or bind three antigens on the same cell or three different epitopes on the same antigen. This format represents a 4 + 4 + 4 trispecific dodeca-valent Quad. The hexadeca-valent tetraspecific Quad contains four different dAbs labeled 1-4, which can bind either four different antigens on four different cells or bind four antigens on the same cell or four epitopes on the same antigen. This format represents a 4 + 4 + 4 + 4 tetraspecific hexadeca-valent Quad.

[0189] FIG. 40. Schematic structural representation of tetravalent non Ig-like Humira Fab-TD Quad (A). The schematic structure of the monomeric building block is also shown. The regions within this molecule containing optional flexible linkers are indicated with arrows (eg, each linker is a (G₄S linker as described herein). The * denotes absence of the core hinge region (ie, the presence of a lower hinge sequence and optionally also an upper hinge sequence). Purified Humira Fab-TD protein was analysed by SDS-PAGE where a single protein band at the expected molecular weight can be seen (B). TNFα binding assay using Humira Fab-TD and Humira Fab monovalent control proteins were performed by ELISA where a dose-dependent binding can be seen (C). The respective TNFα neutralization potency of the Quad proteins were analysed using WEHI cell-based bioassay (D). Enhancement in TNFα neutralization potency can be seen in Humira Fab-TD compared to Humira Fab monovalent control.

[0190] FIG. 41. Schematic structural representation of octavalent Fabs as non Ig-like Quad A) or as Ig-like Quad (B). For each format, the schematic structure of the monomeric building block is also shown. The regions within these molecules containing optional flexible linkers are indicated with arrows (eg, each linker is a (G₄S linker as described herein).

[0191] FIG. 42. Schematics of Quad formats based on binding sites for anti-Target X (a cell-surface receptor) and gel showing expression of Quad constructs.

[0192] FIG. 43. Multimers of the invention surprisingly expand antigen specificity for predetermined binding site: Results of binding assays for Target X and a second cell-surface receptor (Target Y); tetravalent Quad constructs comprise 4 anti-X binding dAb sites and these constructs surprisingly also could bind to Y; constructs comprising one or two anti-X binding sites could only by target-X.

[0193] FIG. 44. Multimers of the invention surprisingly expand antigen specificity for predetermined binding site:Results of binding assays for Target X and a second cell-surface receptor (Target Y); octavalent Quad constructs comprise 8 anti-X binding dAb sites and these constructs surprisingly also could bind to Y; a construct comprising one anti-X binding site could only by target-X.

[0194] FIG. 45. Schematic representation of SARS-CoV-2 diagnostic and serological tests set-up using multivalent reagents. Schematic representation of the multimeric reagents shown in FIGS. 45A-E utilizing p53-TD and non-multimeric reagents used to develop SARS-CoV-2 diagnostic and serological tests (FIGS. 45F-G). Detection of viral antigens using a pair of non-competing standard IgG antibodies. The first antibody is used to coat a solid surface and capture the viral antigen. The second antibody is used to specifically detect the captured antigen. Assay signal is generated through a secondary antibody conjugated with horseradish peroxidase (HRP) such as a anti-His HRP. (FIGS. 45H-I) Viral antigen captured using multimeric ACE2 and the detection of the captured viral antigen is through a standard antibody as described in FIGS. 45F-G or by using multimeric antibodies (FIGS. 45J-K). A pair of non-competing multimeric antibodies used to capture and detect viral antigen (FIGS. 45L-M). Standard serological assay using IgG antibody such as a anti-IgG to capture immunoglobulin in test samples. Viral specific antibodies are detected with the addition of viral protein and the detection signal is generated through a secondary antibody conjugated with HRP such as anti-His HRP (FIG. 45N). A multimeric protein such as Protein G either in a tetravalent (FIG. 45O) or octavalent (FIG. 45P) format is used to capture antibodies in test samples and the viral specific antibodies are detected with the additional of viral antigen in the experimental mix as described in FIG. 45N. Antibodies CR3022 and CR3014 is used as an example of non-competing antibodies against SARS-CoV-2 spike protein. The viral detection or serological test could utilize any non-competing antibodies or protein molecules.

[0195] FIG. 46. CR3022 is a derivative of a human antibody isolated from a patient who recovered from SARS-CoV-1 infection. This antibody is known to bind the receptor binding domain (RBD) of CoV-1 strongly. It also cross-reacts with the RBD of CoV-2 strain but with significantly lower binding affinity as reflected in the above data. However Quad version of CR3022 massively improves the cross-reactive binding to RBD of CoV-2 and well as improving binding to the RBD domain CoV-1 strain. This makes the mulimter version of the CR3022 binding site a favorable candidate for developing as a novel SARS-CoV-2 neutralizing biologic compared to Ig antibodies. The mulimter version of the CR3022 binding site comprised 4 copies of the VH/VL antigen binding site of CR3022, as opposed to the 2 binding sites on the CR3022 Ig.

[0196] FIG. 47. Spike glycoprotein is naturally assembled into a trimer. It can be produced recombinantly as a trimer or only the RBD domain can be produced as a monomer for use in in vitro assays. The spike protein binds ACE2 receptor as the initial step in the infection process. Thus, ACE2 can be potentially used as a decoy receptor to neutralize coronavirus. In this experiment, an octavalent ACE2 Ig-TD Quad (ie, an example of a multimer comprising more than 2 binding sites; this example had 8 ACE2 extracellular proteins) was generated and used to capture the two recombinant forms of the spike protein for comparision. Strikingly, ACE2 Ig-TD Quad binds the trimeric form, which is more analogous to the native form with significantly enhanced binding strength than the RBD domain alone suggesting ACE2 Ig-TD is a good candidate for developing as a super neutralizer of SARS-CoV-2.

[0197] FIG. 48. As shown in the previous FIG. 47, ACE2 Ig-TD can bind spike trimer with higher binding affinity than the RDB domain monomer. The captured recombinant spike proteins were used here to capture seroconverted human antibodies in serum (i.e. The fluid and solute component of blood, which does not play a role in clotting, as the skilled addressee knows). The ACE2 Ig-TD captured trimer can detect seroconverted SARS-CoV-2 antibodies in serum with higher sensitivity than ACE2 Ig-TD captured RBD domain monomer. It is therefore anticipated that ACE2 Ig-TD can not only be used as a decoy to potently neutralize SARS-CoV-2 for therapeutic or prophylactic medical use, but it can alternatively be used in sensitive serological assays for detecting SARS-CoV-2 specific seroconverted antibodies.

[0198] FIG. 49. Schematic of Monomeric Polypeptide Chain Building Blocks useful to produce the multimeric structure of Quad formats.

[0199] FIGS. 50A-52C. Assay formats, reagents (and polypeptides of the invention useful for such assay reagents).

[0200] FIGS. 53A-D. Schematic representations of different Quad formats based on the Fab fragment of an IgG antibody. The monomeric building block of each Quad is shown with regions where optional linkers could be included are indicated. The fully assembled tetramer is also schematically represented in each example. The * denotes hinge region devoid of core hinge allowing for the production of monomeric Ig antibody formats.

[0201] FIGS. 54A-E. Schematic representation of ACE2 based Quads with varying valency from monovalent to octavelency either with or with Fc. In each format, the monomeric building block is shown with regions where optional linker could be included. The fully assembled tetramer is also schematically represented in each example. The * denotes hinge region devoid of core hinge allowing for the production of monomeric Ig formats.

[0202] FIGS. 55A-L. A schematic representations of Quad formats using VHH single domain antibodies as the binding domain. These formats can also be generated using other binding domains such as scFv’s, peptides and other protein domains and fragments. In each example, the monomeric building block is shown with regions where optional linker could be included. The fully assembled tetramer is also schematically represented in each example. The * denotes hinge region devoid of core hinge allowing for the production of monomeric Ig formats.

[0203] FIGS. 56A-J. Analysis of CR3022, CR3022-based Quads and ACE2 Ig-TD Quad for binding and neutralization of spike protein. (A-D) Schematic representation of the Quad formats from monomeric building blocks. Optional linker location and presence or absence of hinge region are indicated (E-F) Indirect binding ELISA of CR3022 and CR3022-based Quads to CoV-1 and CoV-2 RBD. (G) Competitive ELISA analyzing the ability of CR3022 Quads to inhibit ACE2:spike trimer interaction. (H). Analysis of ACE2 Ig-TD Quad binding to SARS CoV-2 full length spike trimer or CoV-2 RBD. (I) Competitive ELISA comparing ACE2:CoV-1 RBD and ACE2:CoV-2 RBD interaction inhibition using ACE2 Ig-TD. (J). Competitive ELISA comparing the neutralization potency for inhibiting ACE2:CoV-2 RBD interaction using CR3022 based Quads and ACE2 Ig-TD.

[0204] FIG. 57. Production and characterization of binding and neutralization potency of SARS CoV-2 reactive GB, BG and FE VHH-based Quads. (A-I) Schematic representation of the different GB Quad formats and (J) confirmation of the protein produced as analysed by SDS-PAGE. (K) Indirect binding ELISA showing binding of the different GB Quad proteins to SARS CoV-2 RBD and (L-N) their functional activity to neutralize ACE2:CoV-2 RBD interaction as analysed by competitive ELISA. (O-P) Reformating of BG and FE nanobodies into monomeric Ig Quad format schematically represented and (Q) their expression confirmed by SDS-PAGE. (R) Analysis of BG and FE Quad binding to CoV-2 RBD and (S) their functional activity to inhibit ACE2:CoV-2 RBD interaction as performed in a competitive ELISA.

[0205] FIG. 58. Competitive sandwich ELISA confirming extremely high neutralization potency of Q185 and Q186/Q182 as compared to potent neutralizing SARS-CoV-2 antibodies reported by Hansen et al (Hansen, J et al. Studies in humanized mice and convalescent humans yield a SARS-CoV-2 antibody cocktail. Science 15 Jun. 2020). A summary table comparing the apparent IC₅₀ of Q185 and Q186/Q182 and the lead neutralizing antibodies isolated by Hansen et al., are shown.

[0206] FIG. 59: Construction and analysis of multivalent monospecific and bispecific tandem VHH Quads. The tandem VHH multivalent Quads are schematically represented (A-F). The location of optional linker(s) and the hinge region status are shown for each Quad format as well as the dimeric intermediate structure for those Quads with an intact core hinge region. SDS-PAGE analysis of the tandem VHH multivalent Quads using either non-reduced or reduced proteins (G). In vitro neutralization potency curves as a dose response of SARS-CoV-2 RBD interaction with ACE2 (H) and a summary of the IC₅₀ values and potency comparisons of the different tandem VHH multivalent Quad molecules vs clinical stage mAbs (I).

[0207] FIG. 60: Construction and analysis of multivalent monospecific and bispecific tandem VHH Quads with increase valances ranging from 12-24. The tandem VHH multivalent Quads are schematically represented (A-L). The location of optional linker(s) and the hinge region status are shown for each Quad format as well as the dimeric intermediate structure for those Quads with an intact core hinge region. SDS-PAGE analysis of the tandem VHH multivalent Quads using either non-reduced (M) or reduced (N) proteins. The content of the lanes in the SDS-PAGE in figures M & N are as follows: 1. Q203/Q205, 2. Q204/Q206, 3. Q177D, 4. Q177E, 5. Q185D, 6. Q185E, 7. Q209/Q182, 8. Q209/Q205, 9. Q210/Q205, 10. Q211/Q206, 11. Q212/Q205 and 12. Q213/Q206. In vitro neutralization potency curves of a selected panel of tandem VHH Quads compared to REGN10987 and a previously constructed multivalent anti-SARS-CoV-2 Quad (Q185B).

[0208] FIG. 61: Construction and analysis of clinical stage mAbs reformatted into three different multivalent Quad formats as schematically represented (A - C). The expression of the newly formatted Quads for the three different clinical stage mAbs were analysed by SDS-PAGE either as non-reduced or reduced proteins (D - F) and their neutralization potential was compared to the parental IgG format as analysed by in vitro competitive ELISA (G - I). The potency enhancement as fold improvement of the Quad formats compared to the parental mAbs and the percentage neutralization of SARS-CoV-2 Spike interaction with ACE2 is summarized as IC₅₀ values (J).

[0209] FIG. 62: Production and analysis of multivalent Nb-112 Quads. Schematic representation of Nb-112 based Quads in a (A) tetravalent and a (B) octavalent configuration. The native VHH Nb-112 nanobody is reformatted with the inclusion of the TD domain to form the monomeric building block from which the tetrameric Quad protein is assembled as a stable protein. The location of the optional flexible linker(s) are shown with an arrow. SDS-PAGE analysis of Q231-Q233 and protein yields from Protein A and Ni-NTA affinity purification is shown (C). Competitive ELISA showing dose-dependent inhibition of ACE2 interaction with SARS-CoV-2 RBD at 2 nM (D) or 150 pM (E) fixed concentration. The IC₅₀ values and percentage neutralization at the highest concentration is shown in the table in panels D-2 and E-2.

[0210] FIG. 63: Production and analysis of multivalent Nb-112 Quads with an intact hinge region. Schematic representation of Nb-112 based Quads with intact hinge region in a (A) tetravalent and a (B) octavalent configuration. The native VHH Nb-112 nanobody is reformatted with the inclusion of the TD domain to form the monomeric building block from which the Quad protein is assembled through a dimeric intermediate into a stable tetrameric protein. SDS-PAGE analysis of Q231-Q233, Q246 and Q247 proteins is shown (C). Competitive ELISA showing dose-dependent inhibition of ACE2 interaction with SARS-CoV-2 RBD at fixed 150 pM is shown in panel D-1 and the table in panels D-2 shows their IC₅₀ values.All polypeptide schematics and amino acid sequences herein are written N- to C-terminal. All nucleotide sequences herein are written 5′ to 3′.

### DETAILED DESCRIPTION

[0211] The invention relates to multimers such as tetramers of polypeptides and tetramers, octamers, dodecamers, hexadecamers or 20-mesr (eg, tetramers and octamers) of epitopes or effector domains (such as antigen binding sites (eg, antibody or TCR binding sites that specifically bind to antigen or pMHC, or variable domains thereof)) or peptides such as incretin, insulin or hormone peptides. In embodiments, multimers of the invention are usefully producible in eurkaryotic systems and can be secreted from eukaryotic cells in soluble form, which is useful for various industrial applications, such as producing pharmaceuticals, diagnostics, as imaging agents, detergents etc. Higher order multimers, such as tetramers or octamers of effector domains or peptides are useful for enhancing antigen or pMHC binding avidity. This may be useful for producing an efficacious medicine or for enhancing the sensitivity of a diagnostic reagent comprising the multimer, such as tetramer or octamer. An additional or alternative benefit is enhanced half-life in vivo when the multimers of the invention are administered to a human or animal subject, eg, for treating or preventing a disease or condition in the subject. Usefully, the invention can also provide for multi-specific (eg, bi- or tri-specific) multivalent binding proteins. Specificity may related to specificity of antigen or pMHC binding. By using a single engineered polypeptide comprising binding domains or peptides, the invention in certain examples usefully provides a means for producing multivalent (eg, bi-specific) proteins at high purity. Use of a single species of engineered polypeptide monomer avoids the problem of mixed products seen when 2 or more different polypeptide species are used to produce multi- (eg, bi-) specific or multivalent proteins.

[0212] The invention also relates to methods and uses to expand antigen specificity of binding sites, as well as vaccines, methods of vaccination and assay methods and reagents.

[0213] The invention provides the following Clauses, Aspects, Paragraphs and Concepts (which are not intended to represent “Claims”; Claims are presented towards the end of this disclosure after the Examples and Tables). Any Clause herein can be combined with any Aspect or Concept herein. Any Aspect herein can be combined with any Concept herein.

### Aspects

[0214] The following Aspects are not to be interpreted as Claims. The Claims start after the Examples section.

[0215] 1. A protein multimer of at least first, second, third and fourth copies of an effector domain (eg, a protein domain) or a peptide, wherein the multimer is multimerised by first, second, third and fourth self-associating tetramerisation domains (TDs) which are associated together, wherein each tetramerisation domain is comprised by a respective engineered polypeptide comprising one or more copies of said protein domain or peptide.

[0216] In an example, each TD is a TD of any one of proteins 1 to 119 listed in Table 2. In an example, each TD is a p53 TD or a homologue or orthologue thereof. In an example, each TD is a NHR2 TD or a homologue or orthologue thereof. In an example, each TD is a p63 TD or a homologue or orthologue thereof. In an example, each TD is a p73 TD or a homologue or orthologue thereof. In an example, each TD is not a NHR2 TD. In an example, each TD is not a p53 TD. In an example, each TD is not a p63 TD. In an example, each TD is not a p73 TD. In an example, each TD is not a p53, 63 or 73 TD. In an example, each TD is not a NHR2, p53, 63 or 73 TD.

[0217] By being “associated together”, the TDs in Aspect 1 multimerise first, second, third and fourth copies of the engineered polypeptide to provide a multimer protein, for example, a multimer that can be expressed intracellulary in a eukaryotic or mammalian cell (eg, a HEK293 cell) and/or which can be extracellularly secreted from a eukaryotic or mammalian cell (eg, a HEK293 cell) and/or which is soluble in an aqueous medium (eg, a eukaryotic or mammalian cell (eg, a HEK293 cell) culture medium). Examples are NHR TD, p53 TD, p63 TD and p73 TD (eg, human NHR TD, p53 TD, p63 TD and p73 TD) or an orthologue or homologue thereof.

[0218] In an example, the TD is not a p53 TD (or homologue or orthologue thereof), eg, it is not a human p53 TD (or homologue or orthologue thereof). In an example, the TD is a NHR2 TD or a homologue or orthologue thereof, but excluding a p53 TD or a homologue or orthologue thereof. In an example, the TD is a human NHR2 TD or a homologue or orthologue thereof, but excluding a human p53 TD or a homologue or orthologue thereof. In an example, the TD is human NHR2. In an example, the amino acid sequence of the TD is at least 80, 85, 90, 95, 96, 97, 98 or 99% identical to the sequence of human NHR2. In an example, the domain or peptide is not naturally comprised by a polypeptide that also comprise a NHR2 TD.

[0219] In an example, all of the domains of the polypeptide are human.

[0220] The engineered polypeptide may comprise one or more copies of said domain or peptide N-terminal to a copy of said TD. Additionally or alternatively, the engineered polypeptide may comprise one or more copies of said domain or peptide C- terminal to a copy of said TD. In an example, the engineered polypeptide comprises a first said domain or peptide and a TD, wherein the first domain or peptide is spaced by at least 10, 20, 30, 40, 50, 60, 70, 80, 90, 100, 200, 300, 400, 500, 600, 700, 800, 900 or 1000 contiguous amino acids from the TD, wherein there is no further said domain or peptide between the first domain or peptide and the TD.

[0221] In an example, the multimer (eg, tetramer of said engineered polypeptide) comprises 4 (but no more than 4) TDs (eg, identical TDs) and 4, 8, 12 or 16 (but no more than said 4, 8, 12 or 16 respectively) copies of said domain or peptide. In an example, each TD and each said domain or peptide is human.

[0222] In an example, the multimer, tetramer, octamer, dodecamer, hexadecamer or 20-mer (eg, tetramer or octamer) comprises first, second, third and fourth identical copies of an engineered polypeptide, the polypeptide comprising a TD and one (but no more than one), two (but no more than two), or more copies of the said protein domain or peptide. For example, a tetramer of the epitope or effector domain has 4 identical copies of the polypeptide comprising a TD and each polypeptide has 1 such epitope or effector domain. For example, an octamer of the epitope or effector domain has 4 identical copies of the polypeptide comprising a TD and each polypeptide has 2 such epitope or effector domain. For example, a dodecamer of the epitope or effector domain has 4 identical copies of the polypeptide comprising a TD and each polypeptide has 3 such epitope or effector domain. For example, a hexadecamer of the epitope or effector domain has 4 identical copies of the polypeptide comprising a TD and each polypeptide has 4 such epitope or effector domain. For example, a 20-mer of the epitope or effector domain has 4 identical copies of the polypeptide comprising a TD and each polypeptide has 5 such epitope or effector domain. Generally, for example, a X-mer of the epitope or effector domain has 4 identical copies of the polypeptide comprising a TD and each polypeptide has X/4 such epitope or effector domain, where X= any multiple of 4, eg, 4, 8, 12, 16, 20, 24, 28 or 32.

[0223] In some embodiments, by requiring just one type of engineered polypeptide to form the multimer, eg, tetramer or octamer, of the invention, the invention advantageously provides a format that can be readily isolated in pure (or highly pure, ie >90, 95, 96, 97, 98 or 99% purity) format, as well as a method for producing such a format in pure (or highly pure) form. Purity is indicated by the multimer of the invention not being in mixture in a composition with any other multimer or polypeptide monomer, or wherein the multimer of the invention comprises >90, 95, 96, 97, 98 or 99% of species in a composition comprising the multimer of the invention and other multimers and/or polypeptide monomers which comprise the engineered polyeptide. Thus, mixtures of different types of polypeptide in these embodiments are avoided or minimised. This advantageously also provides, therefore, plurality of multimers (eg, a plurality of tetramers or octamers or dodecamers or hexadecamers) that comprise only one (and no more than one) type of engineered polypeptide, wherein the multimers are monospecific (but multivalent) for antigen binding, or alternatively bi- or multi-specific for antigen binding. Thus, the invention provides a plurality of multimers (eg, a plurality of tetramers or octamers or dodecamers or hexadecamers, each polypeptide being at least tetra-valent for antigen binding and (i) bi-specific (ie, capable of specifically binding to 2 different antigens) or (ii) mono-specific and at least tetravalent for antigen binding. Herein, where antigen binding is mentioned this can instead be pMHC binding when the domain is a TCR V domain. Advantageously, the plurality is in pure form (ie, not mixed with multimers (eg, tetramers or octamers or dodecamers or hexadecamers) that comprise more than one type of polypeptide monomer. In an example, the multimer comprises at least 2 different types of antigen binding site. In an example, the multimer is bi-specific, tri-specific or tetra-specific. In an example, the multimer has an antigen binding site or pMHC binding site valency of 4, 6, 8, 10 or 12, preferably 4 or 8.

[0224] In an example, a peptide MHC (pMHC) is a class I or class II pMHC.

[0225] By the term “specifically binds,” as used herein, eg, with respect to a domain, antibody or binding site, is meant a domain, antibody or binding site which recognises a specific antigen (or pMHC) with a binding affinity of 1 mM or less as determined by SPR

[0226] Target binding ability, specificity and affinity (KD (also termed Kd), K_{off} and/or Kₒₙ) can be determined by any routine method in the art, eg, by surface plasmon resonance (SPR). The term “KD”, as used herein, is intended to refer to the equilibrium dissociation constant of a particular binding site/ligand, receptor/ligand or antibody/antigen interaction. In one embodiment, the surface plasmon resonance (SPR) is carried out at 25° C. In another embodiment, the SPR is carried out at 37° C. In one embodiment, the SPR is carried out at physiological pH, such as about pH7 or at pH7.6 (eg, using Hepes buffered saline at pH7.6 (also referred to as HBS-EP)). In one embodiment, the SPR is carried out at a physiological salt level, eg, 150 mM NaCl. In one embodiment, the SPR is carried out at a detergent level of no greater than 0.05% by volume, eg, in the presence of P20 (polysorbate 20; eg, Tween-20™) at 0.05% and EDTA at 3 mM. In one example, the SPR is carried out at 25° C. or 37° C. in a buffer at pH7.6, 150 mM NaCl, 0.05% detergent (eg, P20) and 3 mM EDTA. The buffer can contain 10 mM Hepes. In one example, the SPR is carried out at 25° C. or 37° C. in HBS-EP. HBS-EP is available from Teknova Inc (California; catalogue number H8022). In an example, the affinity (eg, of a VH/VL binding site) is determined using SPR by using any standard SPR apparatus, such as by Biacore™ or using the ProteOn XPR36™ (Bio-Rad®). The binding data can be fitted to 1:1 model inherent using standard techniques, eg, using a model inherent to the ProteOn XPR36™ analysis software.

[0227] In an example, a multimer, tetramer or octamer or dodecamer or hexadecamer or 20-mer of the invention is an isolated multimer, tetramer or octamer or dodecamer or hexadecamer or 20-mer. In an example, a multimer, tetramer or octamer of the invention consists of copies of said engineered polypeptide. Optionally the multimer, tetramer or octamer or dodecamer or hexadecamer or 20-mer of the invention comprises 4 or 8 or 12 or 16 or 20 but not more than 4 or 8 or 12 or 16 or 20 copies respectively of the engineered polypeptide.

[0228] By “engineered” is meant that the polypeptide is not naturally-occurring, for example the protein domain or peptide is not naturally comprised by a polypeptide that also comprises said TD.

[0229] Each said protein domain or peptide may be a biologically active domain or peptide (eg, biologically active in humans or animals), such as a domain that specifically binds to an antigen or peptide-MHC (pMHC), or wherein the domain is comprised by an antigen or pMHC binding site. In an alternative, the domain or peptide is a carbohydrate, glucose or sugar-regulating agent, such as an incretin or an insulin peptide. In an alternative, the domain or peptide is an inhibitor or an enzyme or an inhibitor of a biological function or pathway in humans or animals. In an alternative, the domain or peptide is an iron-regulating agent. Thus, in an example, each protein domain or peptide is selected from an antigen or pMHC binding domain or peptide; a hormone; a carbohydrate, glucose or sugar-regulating agent; an iron-regulating agent; and an enzyme inhibitor.
[0230] 2. The multimer of any preceding Aspect, wherein the multimer is a tetramer, octamer, 12-mer, 16-mer or 20-mer (eg, a tetramer, octamer, 12-mer or 16-mer) of said domain or peptide.
[0231] 3. The multimer of any Aspect 1 or 2, comprising a tetramer, octamer, 12-mer, 16-mer or 20-mer (eg, a tetramer, octamer, 12-mer or 16-mer) of an immunoglobulin superfamily binding site (eg, an antibody or TCR binding site, such as a scFv or scTCR).

[0232] The immunoglobulin superfamily (IgSF) is a large protein superfamily of cell surface and soluble proteins that are involved in the recognition, binding, or adhesion processes of cells. Molecules are categorized as members of this superfamily based on shared structural features with immunoglobulins (also known as antibodies); they all possess a domain known as an immunoglobulin domain or fold. Members of the IgSF include cell surface antigen receptors, co-receptors and co-stimulatory molecules of the immune system, molecules involved in antigen presentation to lymphocytes, cell adhesion molecules, certain cytokine receptors and intracellular muscle proteins. They are commonly associated with roles in the immune system.

[0233] T-cell receptor (TCR) domains can be Vα (eg. paired with a Vβ), Vβ (eg. paired with a Vα), Vγ (eg, paired with a V8) or Vδ (eg, paired with a Vy).

[0234] 4. The multimer of Aspect 3, wherein the binding site comprises a first variable domain paired with a second variable domain.

[0235] In a first example, the first and second variable domains are comprised by the engineered polypeptide. In another example, the first domain is comprised by the engineered polypeptide and the second domain is comprised a by a further polypeptide that is different from the engineered polypeptide (and optionally comprises a TD or is devoid of a TD).

[0236] In the alternative, the domains are constant region domains. In an alternative, the domains are FcAbs. In an alternative, the domains are non-Ig antigen binding sites or comprises by a non-Ig antigen binding site, eg, an affibody.

### Antigen Binding Sites & Effector Domains

[0237] In an example, the or each antigen binding site (or effector domain) is selected from the group consisting of an antibody variable domain (eg, a VL or a VH, an antibody single variable domain (domain antibody or dAb), a camelid VHH antibody single variable domain, a shark immunoglobulin single variable domain (NA V), a Nanobody™ or a camelised VH single variable domain); a T-cell receptor binding domain; an immunoglobulin superfamily domain; an agnathan variable lymphocyte receptor (J Immunol; 2010 Aug 1;185(3):1367-74; “Alternative adaptive immunity in jawless vertebrates; Herrin BR & Cooper M D.); a fibronectin domain (eg, an Adnectin™); an scFv; an (scFv)₂; an sc-diabody; an scFab; a centyrin and an antigen binding site derived from a scaffold selected from CTLA-4 (Evibody™); a lipocalin domain; Protein A such as Z-domain of Protein A (eg, an Affibody™ or SpA); an A-domain (eg, an Avimer™ or Maxibody™); a heat shock protein (such as and epitope binding domain derived from GroEI and GroES); a transferrin domain (eg, a trans-body); ankyrin repeat protein (eg, a DARPin™); peptide aptamer; C-type lectin domain (eg, Tetranectin™); human γ- crystallin or human ubiquitin (an affilin); a PDZ domain; scorpion toxin; and a kunitz type domain of a human protease inhibitor.

[0238] Further sources of antigen binding sites are variable domains and VH/VL pairs of antibodies disclosed in WO2007024715 at page 40, line 23 to page 43, line 23. This specific disclosure is incorporated herein by reference as though explicitly written herein to provide basis for epitope binding moieties for use in the present invention and for possible inclusion in claims herein.

[0239] A “domain” is a folded protein structure which has tertiary structure independent of the rest of the protein. Generally, domains are responsible for discrete functional properties of proteins and in many cases may be added, removed or transferred to other proteins without loss of function of the remainder of the protein and/or of the domain. A “single antibody variable domain” is a folded polypeptide domain comprising sequences characteristic of antibody variable domains. It therefore includes complete antibody variable domains and modified variable domains, for example, in which one or more loops have been replaced by sequences which are not characteristic of antibody variable domains, or antibody variable domains which have been truncated or comprise N- or C-terminal extensions, as well as folded fragments of variable domains which retain at least the binding activity and specificity of the full-length domain

[0240] The phrase “immunoglobulin single variable domain” or “antibody single variable domain” refers to an antibody variable domain (VH, VHH, VL) that specifically binds an antigen or epitope independently of a different V region or domain. An immunoglobulin single variable domain can be present in a format (e.g., homo- or hetero-multimer) with other, different variable regions or variable domains where the other regions or domains are not required for antigen binding by the single immunoglobulin variable domain (i.e., where the immunoglobulin single variable domain binds antigen independently of the additional variable domains). A “domain antibody” or “dAb” is the same as an “immunoglobulin single variable domain” which is capable of binding to an antigen as the term is used herein. An immunoglobulin single variable domain may be a human antibody variable domain, but also includes single antibody variable domains from other species such as rodent (for example, as disclosed in WO 00/29004), nurse shark and Camelid VHH immunoglobulin single variable domains. Camelid VHH sre immunoglobulin single variable domain polypeptides that are derived from species including camel, llama, alpaca, dromedary, and guanaco, which produce heavy chain antibodies naturally devoid of light chains. Such VHH domains may be humanised according to standard techniques available in the art, and such domains are still considered to be “domain antibodies” according to the invention. As used herein “VH includes camelid VHH domains. NA V are another type of immunoglobulin single variable domain which were identified in cartilaginous fish including the nurse shark. These domains are also known as Novel Antigen Receptor variable region (commonly abbreviated to V(NAR) or NARV). For further details see Mol. Immunol. 44, 656-665 (2006) and US20050043519A. CTLA-4 (Cytotoxic T Lymphocyte-associated Antigen 4) is a CD28-family receptor expressed on mainly CD4+ T-cells. Its extracellular domain has a variable domain-like Ig fold. Loops corresponding to CDRs of antibodies can be substituted with heterologous sequence to confer different binding properties. CTLA-4 molecules engineered to have different binding specificities are also known as Evibodies. For further details see Journal of Immunological Methods 248 (1-2), 31-45 (2001). Lipocalins are a family of extracellular proteins which transport small hydrophobic molecules such as steroids, bilins, retinoids and lipids. They have a rigid β-sheet secondary structure with a numer of loops at the open end of the conical structure which can be engineered to bind to different target antigens. Anticalins are between 160-180 amino acids in size, and are derived from lipocalins. For further details see Biochim Biophys Acta 1482: 337-350 (2000), US7250297B1 and US20070224633. An affibody is a scaffold derived from Protein A of Staphylococcus aureus which can be engineered to bind to antigen. The domain consists of a three-helical bundle of approximately 58 amino acids. Libraries have been generated by randomisation of surface residues. For further details see Protein Eng. Des. Sel. 17, 455-462 (2004) and EP1641818A1. Avimers™ are multidomain proteins derived from the A-domain scaffold family. The native domains of approximately 35 amino acids adopt a defined disulphide bonded structure. Diversity is generated by shuffling of the natural variation exhibited by the family of A-domains. For further details see Nature Biotechnology 23(12), 1556 - 1561 (2005) and Expert Opinion on Investigational Drugs 16(6), 909-917 (June 2007). A transferrin is a monomeric serum transport glycoprotein. Transferrins can be engineered to bind different target antigens by insertion of peptide sequences in a permissive surface loop. Examples of engineered transferrin scaffolds include the Trans-body. For further details see J. Biol. Chem 274, 24066-24073 (1999). Designed Ankyrin Repeat Proteins (DARPins™) are derived from ankyrin which is a family of proteins that mediate attachment of integral membrane proteins to the cytoskeleton. A single ankyrin repeat is a 33 residue motif consisting of two a-helices and a β-turn. They can be engineered to bind different target antigens by randomising residues in the first a-helix and a β-turn of each repeat. Their binding interface can be increased by increasing the number of modules (a method of affinity maturation). For further details see J. Mol. Biol. 332, 489-503 (2003), PNAS 100(4), 1700-1705 (2003) and J. Mol. Biol. 369, 1015-1028 (2007) and US20040132028A1. Fibronectin is a scaffold which can be engineered to bind to antigen. Adnectins™ consist of a backbone of the natural amino acid sequence of the 10th domain of the 15 repeating units of human fibronectin type III (FN3). Three loops at one end of the β-sandwich can be engineered to enable an Adnectin to specifically recognize a therapeutic target of interest. For further details see Protein Eng. Des. Sel. 18, 435- 444 (2005), US20080139791, WO2005056764 and US6818418B1. Peptide aptamers are combinatorial recognition molecules that consist of a constant scaffold protein, typically thioredoxin (TrxA) which contains a constrained variable peptide loop inserted at the active site. For further details see Expert Opin. Biol. Ther. 5, 783-797 (2005). Microbodies are derived from naturally occurring microproteins of 25-50 amino acids in length which contain 3-4 cysteine bridges -examples of microproteins include KalataBI and conotoxin and knottins. The microproteins have a loop which can be engineered to include upto 25 amino acids without affecting the overall fold of the microprotein. For further details of engineered knottin domains, see WO2008098796. Other epitope binding moieties and domains include proteins which have been used as a scaffold to engineer different target antigen binding properties include human γ-crystallin and human ubiquitin (affilins), kunitz type domains of human protease inhibitors, PDZ- domains of the Ras-binding protein AF-6, scorpion toxins (charybdotoxin), C-type lectin domain (tetranectins) are reviewed in Chapter 7 - Non-Antibody Scaffolds from Handbook of Therapeutic Antibodies (2007, edited by Stefan Dubel) and Protein Science 15: 14-27 (2006).

[0241] In an example, the or each antigen binding site (or effector domain) comprises a non-Ig scaffoled, eg, is selected from the group consisting of Affibodies, Affilins, Anticalins, Atrimers, Avimers, Bicycle Peptides, Cys-knots, DARpins, Fibronectin type III, Fyomers, Kunitz Domain, OBodies, Aptamers, Adnectins, Armadillo Repeat Domain, Beta-Hairpin mimetics and Lipocalins.
[0242] 5. The multimer of any preceding Aspect, wherein each polypeptide comprises first and second copies of said protein domain or peptide, wherein the polypeptide comprises in (N- to C-terminal direction) (i) a first of said copies - TD - the second of said copies; (ii) TD - and the first and second copies; or (iii) said first and second copies - TD.
[0243] 6. The multimer of any preceding Aspect, wherein the TDs are NHR2 TDs and the domain or peptide is not a NHR2 domain or peptide; or wherein the TDs are p53 TDs and the domain or peptide is not a p53 domain or peptide.
[0244] 7. The multimer of any preceding Aspect, wherein the engineered polypeptide comprises one or more copies of a second type of protein domain or peptide, wherein the second type of protein domain or peptide is different from the first protein domain or peptide.

[0245] For example, the polypeptide comprises in N-terminal direction (i) P1- TD -P2; or (ii) TD -P1-P2, wherein P1=a copy of a domain or peptide of the first type (ie, the type of domain or peptide of the multimer of Aspect 1); and P2=a copy of a domain or peptide of said second type.
[0246] 8. The multimer of any preceding Aspect, wherein the domains are immunoglobulin superfamily domains.
[0247] 9. The multimer of any preceding Aspect, wherein the domain or peptide is an antibody variable or constant domain (eg, an antibody single variable domain), a TCR variable or constant domain, an incretin, an insulin peptide, or a hormone peptide.
[0248] 10. The multimer of any preceding Aspect, wherein the multimer comprises first, second, third and fourth identical copies of a said engineered polypeptide, the polypeptide comprising a TD and one (but no more than one), two (but no more than two) or more copies of the said protein domain or peptide.
[0249] 11. The multimer of any preceding Aspect, wherein the engineered polypeptide comprises an antibody or TCR variable domain (V1) and a NHR2 TD.
[0250] 12. The multimer of Aspect 11, wherein the polypeptide comprises (in N- to C-terminal direction) (i) V1-an optional linker-NHR2 TD; (ii) V1-an optional linker-NHR2 TD-optional linker-V2; or (iii) V1-an optional linker-V2 - optional linker - NHR2 TD, wherein V1 and V2 are TCR variable domains and are the same or different, or wherein V1 and V2 are antibody variable domains and are the same or different.
[0251] 13. The multimer of Aspect 12, wherein V1and V2 are antibody single variable domains.
[0252] 14. The multimer of aspect 11, wherein each engineered polypeptide comprises (in N- to C-terminal direction) V1-an optional linker-NHR2 TD, wherein V1 is an antibody or TCR variable domain and each engineered polypeptide is paired with a respective second engineered polypeptide that comprises V2, wherein V2 is a an antibody or TCR variable domain respectively that pairs with V1 to form an antigen or pMHC binding site, and optionally one polypeptide comprises an antibody Fc, or comprises antibody CH1 and the other polypeptide comprises an antibody CL that pairs with the CH1.
[0253] 15. The multimer of any preceding Aspect, wherein the TD comprises (i) an amino acid sequence identical to SEQ ID NO: 10 or 126 or at least 80% identical thereto; or (ii) an amino acid sequence identical to SEQ ID NO: 120 or 123 or at least 80% identical thereto.
[0254] 16. The multimer of any preceding Aspect, wherein the multimer comprises a tetramer, octamer, 12-mer, 16-mer or 20-mer (eg, a tetramer, octamer, 12-mer or 16-mer; or a tetramer or octamer) of an antigen binding site of an antibody selected from the group consisting of ReoPro™; Abciximab; Rituxan™; Rituximab; Zenapax™; Daclizumab; Simulect™; Basiliximab; Synagis™; Palivizumab; Remicade™; Infliximab; Herceptin™; Mylotarg™; Gemtuzumab; Campath™; Alemtuzumab; Zevalin™; Ibritumomab; Humira™; Adalimumab; Xolair™; Omalizumab; Bexxar™; Tositumomab; Raptiva™; Efalizumab; Erbitux™; Cetuximab; Avastin™; Bevacizumab; Tysabri™; Natalizumab; Actemra™; Tocilizumab; Vectibix™; Panitumumab; Lucentis™; Ranibizumab; Soliris™; Eculizumab; Cimzia™; Certolizumab; Simponi™; Golimumab, Ilaris™; Canakinumab; Stelara; Ustekinumab; Arzerra™; Ofatumumab; Prolia™; Denosumab; Numax™; Motavizumab; ABThrax™; Raxibacumab; Benlysta™; Belimumab; Yervoy™; Ipilimumab; Adcetris™; Brentuximab; Vedotin™; Perjeta™; Pertuzumab; Kadcyla™; Ado-trastuzumab; Keytruda™, Opdivo™, Gazyva™ and Obinutuzumab. Optionally, the binding site of the polypeptide of the multimer comprises a VH of the binding site of the antibody and also the CH1 of the antibody (ie, in N- to C-terminal direction the VH-CH1 and SAM). In an embodiment, the polypeptide may be paired with a further polypeptide comprising (in N- to C-terminal direction a VL-CL, eg, wherein the CL is the CL of the antibody).

[0255] For example, a said protein domain of the engineered polypeptide is a V domain (a VH or VL) of an antibody binding site of an antibody selected from said group, wherein the multimer comprises a further V domain (a VL or VH respectively) that pairs with the V domain of the engineered polypeptide to form the antigen binding site of the selected antibody. Advantageously, therefore, the invention provides tetramer, octamer, 12-mer, 16-mer or 20-mer (eg, a tetramer, octamer, 12-mer or 16-mer; or tetramer or octamer)of a binding site of said selected antibody, which beneficially may have improved affinity, avidity and/or efficacy for binding its cognate antigen or for treating or preventing a disease or condition in a human or animal wherein the multimer is administered thereto to bind the cognate antigen in vivo.

[0256] For example, the multimer, tetramer, octamer, 12-mer, 16-mer or 20-mer (eg, a tetramer, octamer, 12-mer or 16-mer; or tetramer or octamer) comprises 4 (or said X/4 as described above) copies of an antigen binding site of an antibody, wherein the antibody is adalimumab, sarilumab, dupilumab, bevacizumab (eg, AVASTIN™), cetuximab (eg, ERBITUX™), tocilizumab (eg, ACTEMRA™) or trastuzumab (HERCEPTIN™). In an alternative the antibody is an anti-CD38 antibody, an anti-TNFa antibody, an anti-TNFR antibody, an anti-IL-4Ra antibody, an anti-IL-6R antibody, an anti-IL-6 antibody, an anti-VEGF antibody, an anti-EGFR antibody, an anti-PD-1 antibody, an anti-PD-L1 antibody, an anti-CTLA4 antibody, an anti-PCSK9 antibody, an anti-CD3 antibody, an anti-CD20 antibody, an anti-CD138 antibody, an anti-IL-1 antibody. In an alternative the antibody is selected from the antibodies disclosed in WO2007024715 at page 40, line 23 to page 43, line 23, the disclosure of which is incorporated herein by reference.

[0257] A binding site herein may, for example, be a ligand (eg, cytokine or growth factor, eg, VEGF or EGFR) binding site of a receptor (eg, KDR or Flt). A binding site herein may, for example, be a binding site of Eyelea™, Avastin™ or Lucentis™, eg, for ocular or oncological medical use in a human or animal. When the ligand or antigen is VEGF, the mutlimer, tetramer or octamer may be for treatment or prevention of a caner or ocular condition (eg, wet or dry AMD or diabetic retinopathy) or as an inhibitor of neovascularisation in a human or animal subject.

[0258] 17. An isolated tetramer, octamer, dodecamer, hexadecamer or 20-mer of a TCR binding site, insulin peptide, incretin peptide or peptide hormone; or a plurality of said tetramers, octamers, dodecamers, hexadecamers or 20-mers.

[0259] Several important peptide hormones are secreted from the pituitary gland. The anterior pituitary secretes three hormones: prolactin, which acts on the mammary gland; adrenocorticotropic hormone (ACTH), which acts on the adrenal cortex to regulate the secretion of glucocorticoids; and growth hormone, which acts on bone, muscle, and the liver. The posterior pituitary gland secretes antidiuretic hormone, also called vasopressin, and oxytocin. Peptide hormones are produced by many different organs and tissues, however, including the heart (atrial-natriuretic peptide (ANP) or atrial natriuretic factor (ANF)) and pancreas (glucagon, insulin and somatostatin), the gastrointestinal tract (cholecystokinin, gastrin), and adipose tissue stores (leptin). In an example, the peptide hormone of the invention is selected from prolactin, ACTH, growth hormone (somatotropin), vasopressin, oxytocin, glucagon, insulin, somatostatin, cholecystokinin, gastrin and leptin (eg, selected from human prolactin, ACTH, growth hormone, vasopressin, oxytocin, glucagon, insulin, somatostatin, cholecystokinin, gastrin and leptin).

[0260] In an example, the incretin is a GLP-1, GIP or exendin-4 peptide.

[0261] The invention provides, in embodiments, the following engineered multimers:-
[0262] An isolated tetramer, octamer, dodecamer, hexadecamer or 20-mer of an incretin.
[0263] An isolated tetramer, octamer, dodecamer, hexadecamer or 20-mer of an insulin peptide.
[0264] An isolated tetramer, octamer, dodecamer, hexadecamer or 20-mer of a GLP-1 (glucagon-like peptide-1 (GLP-1) peptide.
[0265] An isolated tetramer, octamer, dodecamer, hexadecamer or 20-mer of a GIP (glucose-dependent insulinotropic polypeptide) peptide.
[0266] An isolated tetramer, octamer, dodecamer, hexadecamer or 20-mer of an exendin (eg, exendin-4) peptide.
[0267] An isolated tetramer, octamer, dodecamer, hexadecamer or 20-mer of a peptide hormone.
[0268] An isolated tetramer, octamer, dodecamer, hexadecamer or 20-mer of a prolactin or prolactin peptide.
[0269] An isolated tetramer, octamer, dodecamer, hexadecamer or 20-mer of a ACTH or ACTH peptide.
[0270] An isolated tetramer, octamer, dodecamer, hexadecamer or 20-mer of a growth hormone or growth hormone peptide.
[0271] An isolated tetramer, octamer, dodecamer, hexadecamer or 20-mer of a vasopressin or vasopressin peptide.
[0272] An isolated tetramer, octamer, dodecamer, hexadecamer or 20-mer of an oxytocin or oxytocin peptide.
[0273] An isolated tetramer, octamer, dodecamer, hexadecamer or 20-mer of a glucagon or glucagon peptide.
[0274] An isolated tetramer, octamer, dodecamer, hexadecamer or 20-mer of a insulin or insulin peptide.
[0275] An isolated tetramer, octamer, dodecamer, hexadecamer or 20-mer of a somatostatin or somatostatin peptide.
[0276] An isolated tetramer, octamer, dodecamer, hexadecamer or 20-mer of a cholecystokinin or cholecystokinin peptide.
[0277] An isolated tetramer, octamer, dodecamer, hexadecamer or 20-mer of a gastrin or gastrin peptide.
[0278] An isolated tetramer, octamer, dodecamer, hexadecamer or 20-mer of a leptin or leptin peptide.
[0279] An isolated tetramer, octamer, dodecamer, hexadecamer or 20-mer of an antibody binding site (eg, a scFv or Fab).
[0280] An isolated tetramer, octamer, dodecamer, hexadecamer or 20-mer of a TCR binding site (eg, a scTCR).
[0281] An isolated tetramer, octamer, dodecamer, hexadecamer or 20-mer of a TCR Vα/Vβ binding site.
[0282] An isolated tetramer, octamer, dodecamer, hexadecamer or 20-mer of a TCR Vγ/Vδ binding site.
[0283] An isolated tetramer, octamer, dodecamer, hexadecamer or 20-mer of an antibody single variable domain binding site.
[0284] An isolated tetramer, octamer, dodecamer, hexadecamer or 20-mer of an FcAb binding site.

[0285] In an example of any of these tetramer, octamer, dodecamer, hexadecamer or 20-mers, the domain or peptide is human. In an example of any of these tetramer, octamer, dodecamer, hexadecamer or 20-mers, the tetramer, octamer, dodecamer, hexadecamer or 20-mer comprises a NHR2 TD (eg, a human NHR2). In an example of any of these tetramer, octamer, dodecamer, hexadecamer or 20-mers, the tetramer, octamer, dodecamer, hexadecamer or 20-mer comprises a p53 TD (eg, a human p53 TD). In an example of any of these tetramer, octamer, dodecamer, hexadecamer or 20-mers, the tetramer, octamer, dodecamer, hexadecamer or 20-mer comprises a p63 TD (eg, a human p63 TD). In an example of any of these tetramer, octamer, dodecamer, hexadecamer or 20-mers, the tetramer, octamer, dodecamer, hexadecamer or 20-mer comprises a p73 TD (eg, a human p73 TD). In an example of any of these tetramer, octamer, dodecamer, hexadecamer or 20-mers, the tetramer, octamer, dodecamer, hexadecamer or 20-mer comprises a tetramer of TDs (eg, human NHR2 TDs), whereby the domains or peptides form a multimer of 4 or 8 domains or peptides.

[0286] In an example, the plurality is pure, eg, is not in mixture with multimers of said binding site or peptide wherein the multimers comprise more than one type of polypeptide monomer.

[0287] 18. The multimer, tetramer, octamer, dodecamer, hexadecamer or 20-mer of any preceding Aspect, wherein the mulitmer, tetramer, octamer, dodecamer, hexadecamer or 20-mer is
[0288] (a) soluble in aqueous solution (eg, an aqueous eukaryotic cell growth medium or buffer);
[0289] (b) secretable from a eukaryotic cell; and/or
[0290] (c) an expression product of a eukaryotic cell.

[0291] In an example the multimer, tetramer, octamer, dodecamer, hexadecamer or 20-mer is secretable from a HEK293T (or other eukaryotic, mammalian, CHO or Cos) cell in stable form as indicated by a single band at the molecular weight expected for said multimer, tetramer, octamer, dodecamer, hexadecamer or 20-mer on a PAGE gel using a sample of supernatant from such cells and detected using Western Blot.

[0292] 19. A tetramer, octamer, dodecamer, hexadecamer or 20-mer (eg, atetramer or octamer) of
[0293] (a) TCR V domains or TCR binding sites, wherein the tetramer, octamer, dodecamer, hexadecamer or 20-mer is soluble in aqueous solution (eg, an aqueous eukaryotic cell growth medium or buffer);
[0294] (b) antibody single variable domains, wherein the tetramer, octamer, dodecamer, hexadecamer or 20-mer is soluble in aqueous solution (eg, an aqueous eukaryotic cell growth medium or buffer);
[0295] (c) TCR V domains or TCR binding sites, wherein the tetramer, octamer, dodecamer, hexadecamer or 20-mer is capable of being intracellularly and/or extracellularly expressed by HEK293 cells; or
[0296] (d) antibody variable domains (eg, antibody single variable domains), wherein the tetramer, octamer, dodecamer, hexadecamer or 20-mer is capable of being intracellularly and/or extracellularly expressed by HEK293 cells.

[0297] An example of the medium is SFMII growth medium supplemented with L-glutamine (eg, complete SFMII growth medium supplemented with 4 mM L-glutamine). In an example, the medium is serum-free HEK293 cell culture medium. In an example, the medium is serum-free CHO cell culture medium.

[0298] For example, a cell herein is a human cell, eg, a HEK293 cell (such as a HEK293T cell).
[0299] 20. The multimer, tetramer, octamer, dodecamer, hexadecamer or 20-mer of any preceding Aspect, wherein the tetramer, octamer, dodecamer, hexadecamer or 20-mer is bi-specific for antigen or pMHC binding.
[0300] 21. The multimer, tetramer, octamer, dodecamer, hexadecamer or 20-mer of any preceding Aspect, wherein the domains are identical.
[0301] 22. The multimer, tetramer, octamer, dodecamer, hexadecamer or 20-mer of any preceding Aspect, wherein the multimer, tetramer, octamer, dodecamer, hexadecamer or 20-mer comprises eukaryotic cell glycosylation.

[0302] For example, the glycosylation is CHO cell glycosylation. For example, the glycosylation is HEK (eg, HEK293, such as HEK293T) cell glycosylation. For example, the glycosylation is Cos cell glycosylation. For example, the glycosylation is Picchia cell glycosylation. For example, the glycosylation is Sacchaaromyces cell glycosylation.
[0303] 23. The multimer, tetramer, octamer, dodecamer, hexadecamer or 20-mer of Aspect 22, wherein the cell is a HEK293 cell.
[0304] 24. A plurality of multimers, tetramer, octamer, dodecamer, hexadecamer or 20-mer of any preceding Aspect.
[0305] 25. A pharmaceutical composition comprising the multimer(s), tetramer(s), octamer(s), dodecamer(s), hexadecamer(s) or 20-mer(s) of any preceding Aspect and a pharmaceutically acceptable carrier, diluent or excipient.
[0306] 26. A cosmetic, foodstuff, beverage, cleaning product, detergent comprising the multimer(s), tetramer(s), octamer(s), dodecamer(s), hexadecamer(s) or 20-mer(s) of any one of Aspects 1 to 24.
[0307] 27. A said engineered (and optionally isolated) polypeptide or a monomer (optionally isolated) of a multimer, tetramer, octamer, dodecamer, hexadecamer or 20-mer of any preceding Aspect.

[0308] The monomer is an engineered polypeptide as disclosed herein, comprising a said protein domain or peptide and further comprising a TD.

[0309] Optionally, the engineered polypeptide comprises (in N- to C-terminal direction) a variable domain (V1) - a constant domain (C) (eg, a CH1 or Fc) - optional linker - TD.

[0310] 28. An engineered (and optionally isolated) engineered polypeptide (P1) which comprises (in N-to C-terminal direction):-
[0311] (a) TCR V1 -TCR C1 - antibody C (eg, CH, CH1 (such as IgG CH1) or CL (such as Cλ or a Cκ)) - optional linker - TD, wherein
   [0312] (i) V1 is a Vα and C1 is a Cα;
   [0313] (ii) V1 is a Vβ and C1 is a Cβ;
   [0314] (iii) V1 is a Vγ and C1 is a Cy; or
   [0315] (iv) V1 is a Vδ and C1 is a Cδ; or
[0316] (b) TCR V1 - antibody C (eg, CH, CH1 (such as IgG CH1) or CL (such as Cλ or a Cκ)) -optional linker - TD, wherein
   [0317] (i) V1 is a Vα;
   [0318] (ii) V1 is a Vβ;
   [0319] (iii) V1 is a Vy; or
   [0320] (iv) V1 is a Vδ;
   or
[0321] (c) antibody V1 - antibody C (eg, CH, CH1 (such as IgG CH1) or CL (such as Cλ or a Cκ)) -optional linker - TD, wherein
   [0322] (i) V1 is a VH; or
   [0323] (ii) V1 is a VL (eg, a Vλ, or a Vκ);
   or
[0324] (d) antibody V1 - optional antibody C (eg, CH, CH1 (such as IgG CH1) or CL (such as Cλ or a Cκ)) - antibody Fc (eg, an IgG Fc) - optional linker - TD, wherein
   [0325] (i) V1 is a VH; or
   [0326] (ii) V1 is a VL (eg, a Vλ, or a Vκ);
   or
[0327] (e) antibody V1 - antibody CL (eg, a Cλ or a Cκ) - optional linker - TD, wherein
   [0328] (i) V1 is a VH; or
   [0329] (ii) V1 is a VL (eg, a Vλ or a Vκ);
   or
[0330] (f) TCR V1 -TCR C1 - optional linker - TD, wherein
   [0331] (i) V1 is a Vα and C1 is a Cα;
   [0332] (ii) V1 is a Vβ and C1 is a Cβ;
   [0333] (iii) V1 is a Vγ and C1 is a Cy; or
   [0334] (iv) V1 is a Vδ and C1 is a Cδ.

[0335] In (a) or (b), in an example, the TCR V is comprised by an single chain TCR binding site (scTCR) that specifically binds to a pMHC, wherein the binding site comprises TCR V-linker -TCRV. In an example, the engineered polypeptide comprises (in N- to C-terminal direction) (i) V1 -linker - V - optional C - optional linker - TD, or (ii) Va - linker - V1 - optional C - optional linker -TD, wherein Va is a TCR V domain and C is an antibody C domain (eg, a CH1 or CL) or a TCR C.

[0336] Preferably, the antibody C is CH1 (eg, IgG CH1).

[0337] In an example the multimer, tetramer, octamer, dodecamer, hexadecamer or 20-mer has a size of no more than 155 kDa, eg, wherein said protein domain is an antibody variable domain comprising a CDR3 of at least 16, 17, 18, 19, 20, 21 or 22 amino acids, such as a Camelid CDR3 or bovine CDR3.

[0338] In an example, the multimer, tetramer, octamer, dodecamer, hexadecamer or 20-mer comprises TCR binding sites and antibody binding sites. For example, each polypeptide comprises a TCR V (eg, comprised by a scTCR that specifically binds a pMHC) and an antibody V (eg, comprised by a scFv or paired with a second V domain comprised by a said second polypeptide to form a V/V paired binding site that specifically binds to an antigen). In an example, the pMHC comprises a RAS peptide. In an example the antigen is selected from the group consisting of PD-1, PD-L1 or any other antigen disclosed herein. For example, the antigen is PD-1 and the pMHC comprises a RAS peptide.

[0339] 29. The polypeptide of Aspect 28, wherein the engineered polypeptide P1 is paired with a further polypeptide (P2), wherein P2 comprises (in N- to C-terminal direction):-
[0340] (g) TCR V2 -TCR C2 - antibody CL (eg, a Cλ or a Cκ), wherein P1 is according to (a) recited in Aspect 28 and
   [0341] (i) V2 is a Vα and C2 is a Cα when P1 is according to (a)(ii);
   [0342] (ii) V2 is a Vβ and C2 is a Cβ when P1 is according to (a)(i);
   [0343] (iii) V2 is a Vγ and C2 is a Cγ when P1 is according to (a)(iv); or
   [0344] (iv) V2 is a Vδ and C2 is a Cδ when P1 is according to (a)(iii);
   or
[0345] (h) TCR V2 - antibody CL (eg, a Cλ or a Cκ), wherein P1 is according to (b) recited in Aspect 28 and
   [0346] (i) V2 is a Vα when P1 is according to (b)(ii);
   [0347] (ii) V2 is a Vβ when P1 is according to (b)(i);
   [0348] (iii) V2 is a Vγ when P1 is according to (b)(iv); or
   [0349] (iv) V2 is a Vδ when P1 is according to (b)(iiii);
   or
[0350] (i) Antibody V2 - CL (eg, a Cλ or a Cκ), wherein P1 is according to (c) recited in Aspect 28 and
   [0351] (i) V2 is a VH when P1 is according to (c)(ii); or
   [0352] (ii) V2 is a VL (eg, a Vλ or a Vκ) when P1 is according to (c)(i);
   or
[0353] (j) Antibody V2 - optional CL (eg, a Cλ or a Cκ), wherein P1 is according to (d) recited in Aspect 28 and
   [0354] (i) V2 is a VH when P1 is according to (d)(ii); or
   [0355] (ii) V2 is a VL (eg, a Vλ or a Vκ) when P1 is according to (d)(i);
   or
[0356] (k) Antibody V2 - CH1 (eg, IgG CH1), wherein P1 is according to (e) recited in Aspect 28 and
   [0357] (i) V2 is a VH when P1 is according to (e)(ii); or
   [0358] (ii) V2 is a VL (eg, a Vλ or a Vκ) when P1 is according to (e)(i);
   or
[0359] (1) TCR V2 -TCR C2, wherein Pis according to (f) recited in Aspect 28 and
   [0360] (i) V2 is a Vα and C2 is a Cα when P1 is according to (f)(ii);
   [0361] (ii) V2 is a Vβ and C2 is a Cβ when P1 is according to (f)(i);
   [0362] (iii) V2 is a Vγ and C2 is a Cγ when P1 is according to (f)(iii); or
   [0363] (iv) V2 is a Vδ and C2 is a Cδ when P1 is according to (f)(iv).

[0364] Optionally, V1 and V2 form a paired variable domain binding site that is capable of specifically binding to an antigen or pMHC. In an example, V1 and V2 are variable domains of an antibody, eg, selected from the group consisting of ReoPro™; Abciximab; Rituxan™; Rituximab; Zenapax™; Daclizumab; Simulect™; Basiliximab; Synagis™; Palivizumab; Remicade™; Infliximab; Herceptin™; Mylotarg™; Gemtuzumab; Campath™; Alemtuzumab; Zevalin™; Ibritumomab; Humira™; Adalimumab; Xolair™; Omalizumab; Bexxar™; Tositumomab; Raptiva™; Efalizumab; Erbitux™; Cetuximab; Avastin™; Bevacizumab; Tysabri™; Natalizumab; Actemra™; Tocilizumab; Vectibix™; Panitumumab; Lucentis™; Ranibizumab; Soliris™; Eculizumab; Cimzia™; Certolizumab; Simponi™; Golimumab, Ilaris™; Canakinumab; Stelara™; Ustekinumab; Arzerra™; Ofatumumab; Prolia™; Denosumab; Numax™; Motavizumab; ABThrax™; Raxibacumab; Benlysta™; Belimumab; Yervoy™; Ipilimumab; Adcetris™; Brentuximab; Vedotin™; Perjeta™; Pertuzumab; Kadcyla™; Ado-trastuzumab; Keytruda™, Opdivo™, Gazyva™ and Obinutuzumab. Optionally, the binding site of the polypeptide of the multimer comprises a VH of the binding site of the antibody and also the CH1 of the antibody (ie, in N- to C-terminal direction the VH-CH1 and SAM). In an embodiment, the polypeptide may be paired with a further polypeptide comprising (in N- to C-terminal direction a VL-CL, eg, wherein the CL is the CL of the antibody).

[0365] In one embodiment, the antibody is Avastin.

[0366] In one embodiment, the antibody is Actemra.

[0367] In one embodiment, the antibody is Erbitux.

[0368] In one embodiment, the antibody is Lucentis.

[0369] In one embodiment, the antibody is sarilumab.

[0370] In one embodiment, the antibody is dupilumab.

[0371] In one embodiment, the antibody is alirocumab.

[0372] In one embodiment, the antibody is bococizumab.

[0373] In one embodiment, the antibody is evolocumab.

[0374] In one embodiment, the antibody is pembrolizumab.

[0375] In one embodiment, the antibody is nivolumab.

[0376] In one embodiment, the antibody is ipilimumab.

[0377] In one embodiment, the antibody is remicade.

[0378] In one embodiment, the antibody is golimumab.

[0379] In one embodiment, the antibody is ofatumumab.

[0380] In one embodiment, the antibody is Benlysta.

[0381] In one embodiment, the antibody is Campath.

[0382] In one embodiment, the antibody is rituximab.

[0383] In one embodiment, the antibody is Herceptin.

[0384] In one embodiment, the antibody is durvalumab.

[0385] In one embodiment, the antibody is daratumumab.

[0386] In an example, any binding domain herein (eg, a dAb or scFv or Fab) or V1 is capable (itself when a single variable domain, or when paired with V2) of specifically binding to an antigen selected from the group consisting of ABCF1; ACVR1; ACVR1B; ACVR2; ACVR2B; ACVRL1; ADORA2A; Aggrecan; AGR2; AICDA; AWI; AIG1; AKAP1; AKAP2; AIYIH; AMHR2; ANGPT1; ANGPT2; ANGPTL3; ANGPTL4; ANPEP; APC; APOC1; AR; AZGP1 (zinc-a-glycoprotein); B7.1; B7.2; BAD; BAFF; BAG1; BAI1; BCL2; BCL6; BDNF; BLNK; BLRl (MDR15); BlyS; BM Pl; BMP2; BMP3B (GDFIO); BMP4; BMP6; BM P8; BMPRIA; BMPRIB; BM PR2; BPAG1 (plectin); BRCA1; CI9orflO (IL27w); C3; C4A; C5; C5R1; CANT1; CASP1; CASP4; CAV1; CCBP2 (D6 / JAB61); CCL1 (1-309); CCL11 (eotaxin); CCL13 (MCP-4); CCL15 (MIP-id); CCL16 (HCC-4); CCL17 (TARC); CCL18 (PARC); CCL19 (M IP-3b); CCL2 (MCP-1); MCAF; CCL20 (MIP-3a); CCL21 (MIP-2); SLC; exodus-2; CCL22 (MDC / STC-1); CCL23 (M PIF-1); CCL24 (MPIF-2 I eotaxin-2); CCL25 (TECK); CCL26 (eotaxin-3); CCL27 (CTACK /ILC) ; CCL28; CCL3 (MIP-la); CCL4 (M IP-lb); CCL5 (RANTES); CCL7 (MCP-3); CCL8 (mcp-2); CCNA1; CCNA2; CCND1; CCNE1; CCNE2; CCR1 (CKR1 / HM145); CCR2 (mcp-1RB / RA);CCR3 (CKR3 / CMKBR3); CCR4; CCR5 (CM KBR5 / ChemR13); CCR6 (CMKBR6 / CKR-L3 / STRL22 / DRY6); CCR7 (CKR7 / EBI1); CCR8 (CM KBR8 / TER1 / CKR-L1); CCR9 (GPR-9-6); CCRL1 (VSHK1); CCRL2 (L-CCR); CD164; CD19; CD1C; CD20; CD200; CD-22; CD24; CD28; CD3; CD37; CD38; CD3E; CD3G; CD3Z; CD4; CD40; CD40L; CD44; CD45RB; CD52; CD69; CD72; CD74; CD79A; CD79B; CD8; CD80; CD81; CD83; CD86; CDH1 (E-cadherin); CDH10; CDH12; CDH13; CDH18; CDH19; CDH20; CDH5; CDH7; CDH8; CDH9; CDK2; CDK3; CDK4; CDK5; CDK6; CDK7; CDK9; CDKN1A (p2IWapl/Cipl); CDKN1B (p27Kipl); CDKNIC; CDKN2A (pl6INK4a); CDKN2B; CDKN2C; CDKN3; CEBPB; CER1; CHGA; CHGB; Chitinase; CHST10; CKLFSF2; CKLFSF3; CKLFSF4; CKLFSF5; CKLFSF6; CKLFSF7; CKLFSF8; CLDN3; CLDN7 (claudin-7); CLN3; CLU (clusterin); CMKLR1; CMKOR1 (RDC1); CNR1; COL18A1; COL1A1; COL4A3; COL6A1; CR2; CRP; CSF1 (M-CSF); CSF2 (GM-CSF); CSF3 (GCSF); CTLA4; CTNNB1 (b-catenin); CTSB (cathepsin B); CX3CL1 (SCYDi) ; CX3CR1 (V28); CXCL1 (GRO1); CXCLIO (IP-10); CXCL11 (1-TAC / IP-9); CXCL12 (SDF1); CXCL13; CXCL14; CXCL16; CXCL2 (GR02); CXCL3 (GR03); CXCL5 (ENA-78 I LIX); CXCL6 (GCP-2); CXCL9 (MIG); CXCR3 (GPR9/CKR-L2); CXCR4; CXCR6 (TYMSTRISTRL33 I Bonzo); CYB5; CYC1; CYSLTR1; DAB2IP; DES; DKFZp451J0118; DNCL1; DPP4; E2F1; ECGF1; EDG1; EFNAI; EFNA3; EFNB2; EGF; EGFR; ELAC2; ENG; EN01; EN02; EN03; EPHB4; EPO; ERBB2 (Her-2); EREG; ERK8; ESR1; ESR2; F3 (TF); FADD; FasL; FASN; FCER1A; FCER2; FCGR3A; FGF; FGF1 (aFGF); FGF10; FGF11; FGF12; FGF12B; FGF13; FGF14; FGF16; FGF17; FGF18; FGF19; FGF2 (bFGF); FGF20; FGF21; FGF22; FGF23; FGF3 (int-2); FGF4 (HST); FGF5; FGF6 (HST-2); FGF7 (KGF); FGF8; FGF9; FGFR3; FIGF (VEGFD); FIL1 (EPSILON); FIL1 (ZETA); FU12584; FU25530; FLRT1 (fibronectin); FLT1; FOS; FOSL1 (FRA-I); FY (DARC); GABRP (GABAa); GAGEB1; GAGEC1; GALNAC4S-65T; GATA3; GDF5; GFI1; GGT1; GM-CSF; GNAS1; GNRH1; GPR2 (CCRIO); GPR31; GPR44; GPR81 (FKSG80); GRCCIO (CIO); GRP; GSN (Gelsolin); GSTP1; HAVCR2; HDAC4; EDAC5; HDAC7A; HDAC9; HGF; HIF1A; HIP1; histamine and histamine receptors; HLA-A; HLA-DRA; HM74; HMOX1; HUMCYT2A; ICEBERG; ICOSL; 1D2; IFN-a; IFNA1; IFNA2; IFNA4; IFNA5; IFNA6; IFNA7; IFNB1; IFNgamma; TFNW1; IGBP1; IGF1; IGF1R; IGF2; IGFBP2; IGFBP3; IGFBP6; IL-1; IL10; IL10RA; IL10RB; IL11; IL11RA; IL-12; IL12A; IL12B; IL12RB1; IL12RB2; 1L13; IL13RA1; IL13RA2; 1L14; 1L15; IL15RA; IL16; 1L17; IL17B; IL17C; IL17R; 1L18; IL18BP; IL18R1; IL18RAP; 1L19; ILIA; IL1B; IL1F10; IL1F5; IL1F6; IL1F7; IL1F8; IL1F9; IL1HY1; IL1R1; IL1R2; IL1RAP; IL1RAPL1; IL1RAPL2; IL1RL1;IL1RL2 IL1RN; 1L2; 1L20; IL20RA; IL21R; 1L22; 1L22R; 1L22RA2; 1L23; 1L24; 1L25; 1L26; 1L27; 1L28A; 1L28B; 1L29; IL2RA; IL2RB; IL2RG; 1L3; 1L30; IL3RA; 1L4; IL4R; 1L5; IL5RA; 1L6; IL6R; IL6ST (glycoprotein 130); 1L7; TL7R; 1L8; IL8RA; IL8RB; IL8RB; 1L9; IL9R; ILK; INHA; INHBA; INSL3; INSL4; IRAKI; IRAK2; ITGA1; ITGA2; 1TGA3; ITGA6 (a6 integrin); ITGAV; ITGB3; ITGB4 (b 4 integrin); JAG1; JAK1; JAK3; JUN; K6HF; KAI1; KDR; MTLG; KLF5 (GC Box BP); KLF6; KLK10; KLK12; KLK13; KLK14; KLK15; KLK3; KLK4; KLK5; KLK6; KLK9; KRT1; KRT19 (Keratin 19); KRT2A; KRTHB6 (hair-specific type II keratin); LAMA5; LEP (leptin); Lingo-p75; Lingo-Troy; LPS; LTA (TNF-b); LTB; LTB4R (GPR16); LTB4R2; LTBR; MACMARCKS; MAG or Omgp; MAP2K7 (c-Jun); MDK; M IB1; midkine; M IF; M IP-2; MK167 (Ki-67); MMP2; M MP9; MS4A1; MSMB; MT3 (metallothionectin-ifi); MTSS 1; M UC 1 (mucin); MYC; MYD88; NCK2; neurocan; NFKB 1; NFKB2; NGFB (NGF); NGFR; NgR-Lingo; NgR-Nogo66 (Nogo); NgR-p75; NgR-Troy; NM E1 (NM23A); NOX5; NPPB; NROB1; NROB2; NR1D1; NR1D2; NR1H2; NR1H3; NR1H4; NR1I2; NR1I3; NR2C1; NR2C2; NR2E1; NR2E3; NR2F1; NR2F2; NR2F6; NR3C1; NR3C2; NR4A1; NR4A2; NR4A3; NR5A1; NR5A2; NR6A1; NRP1; NRP2; NT5E; NTN4; ODZ1; OPRD1; P2RX7; PAP; PARTI; PATE; PAWR; PCA3; PCNA; PDGFA; PDGFB; PECAM1; PF4 (CXCL4); PGF; PGR; phosphacan; PIAS2; PIK3CG; PLAU (uPA); PLG; PLXDC1; PPBP (CXCL7); PPID; PR1; PRKCQ; PRKD1; PRL; PROC; PROK2; PSAP; PSCA; PTAFR; PTEN; PTGS2 (COX-2); PTN; RAC2 (p2IRac2); RARB; RGS1; RGS13; RGS3; RNF110 (ZNF144); ROB02; S100A2; SCGB1D2 (lipophilin B); SCGB2A1 (mammaglobin 2); SCGB2A2 (mammaglobin 1); SCYE1 (endothelial Monocyte-activating cytokine); SDF2; SERPINA1; SERPINIA3; SERPINB5 (maspin); SERPINE1 (PAT-i); SERPINF1; SHBG; SLA2; SLC2A2; SLC33A1; SLC43A1; SLIT2; SPP1; SPRRIB (Spri); ST6GAL1; STAB1; STAT6; STEAP; STEAP2; TB4R2; TBX21; TCPIO; TDGF1; TEK; TGFA; TGFB1; TGFB1I1; TGFB2; TGFB3; TGFBI; TGFBR1; TGFBR2; TGFBR3; TH1L; THBS1(thrombospondin-1); THBS2; THBS4; THPO; TIE (Tie-i); T]MP3; tissue factor; TLRIO; TLR2; TLR3; TLR4; TLR5; TLR6; TLR7; TLR8; TLR9; TNF; TNF-a (also referred to herein as TNF alpha or TNFα); TNFAIP2 (B94); TNFAIP3; TNFRSF1 1A; TNFRSF1A; TNFRSF1B; TNFRSF21; TNFRSF5; TNFRSF6 (Fas); TNFRSF7; TNFRSF8; TNFRSF9; TNFSFIO (TRAIL); TNFSF1 1 (TRANCE); TNFSF12 (AP03L); TNFSF13 (April); TNFSF13B; TNFSF14 (HVEM-L); TNFSF1 5 (VEGI); TNFSF1 8; TNFSF4 (0X40 ligand); TNFSF5 (CD40 ligand); TNFSF6 (FasL); TNFSF7 (CD27 ligand); TNFSF8 (CD30 ligand); TNFSF9 (4-1BB ligand); TOLLIP; Toll-like receptors; TOP2A (topoisomerase lia); TP53; TPM 1; TPM2; TRADD; TRAF1; TRAF2; TRAF3; TRAF4; TRAF5; TRAF6; TREM 1; TREM2; TRPC6; TSLP; TWEAK; VEGF; VEGFB; VEGFC; versican; VHL C5; VLA-4; XCL1 (lymphotactin); XCL2 (SCM-lb); XCR1 (GPR5 / CCXCR1); YY1; and ZFPM2.

[0387] For example in any configuration of the invention, the multimer, octamer, dodecamer, hexadecamer or 20-mer specifically binds to first and second (eg, for an octamer, dodecamer, hexadecamer or 20-mer); optionally, first, second and third (eg, for a dodecamer, hexadecamer or 20-mer); or optionally, first, second, third and fourth (eg, for a hexadecamer or 20-mer); or optionally, first, second, third, fourth and fifth (eg, for a 20-mer) epitopes or antigens, each of which is selected from the group consisting of EpCAM and CD3; CD19 and CD3; VEGF and VEGFR2; VEGF and EGFR; CD138 and CD20; CD138 and CD40; CD20 and CD3; CD38 and CD138; CD38 and CD20; CD38 and CD40; CD40 and CD20; CD19 and CD20; CD-8 and IL-6; PDL-1 and CTLA-4; CTLA-4 and BTN02; CSPGs and RGM A; IGF1 and IGF2; IGF1 and/or 2 and Erb2B; IL-12 and IL-18; IL-12 and TWEAK; IL-13 and ADAM8; IL-13 and CL25; IL-13 and IL-lbeta; IL-13 and IL-25; IL-13 and IL-4; IL-13 and IL-5; IL-13 and IL-9; IL-13 and LHR agonist; IL-13 and MDC; IL-13 and MIF; IL-13 and PED2; IL-13 and SPRR2a; IL-13 and SPRR2b; IL-13 and TARC; IL-13 and TGF-beta; IL-1 alpha and IL-1 beta; MAG and RGM A; NgR and RGM A; NogoA and RGM A; OMGp and RGM A; RGM A and RGM B; Te38 and TNF alpha; TNF alpha and IL-12; TNF alpha and IL-12p40; TNF alpha and IL-13; TNF alpha and IL-15; TNF alpha and IL-17; TNF alpha and IL-18; TNF alpha and IL-1 beta; TNF alpha and IL-23; TNF alpha and M IF; TNF alpha and PEG2; TNF alpha and PGE4; TNF alpha and VEGF; and VEGFR and EGFR; TNF alpha and RANK ligand; TNF alpha and Blys; TNF alpha and GP130; TNF alpha and CD-22; and TNF alpha and CTLA-4

[0388] For example, the first epitope or antigen is selected from the group consisting of CD3; CD16; CD32; CD64; and CD89; and the second epitope or antigen is selected from the group consisting of EGFR; VEGF; IGF-1R; Her2; c-Met (aka HGF); HER3; CEA; CD33; CD79a; CD19; PSA; EpCAM; CD66; CD30; HAS; PSMA; GD2; ANG2; IL-4; IL-13; VEGFR2; and VEGFR3.

[0389] In an example, any binding domain herein (eg, a dAb or scFv or Fab) or V1 is capable (itself when a single variable domain, or when paired with V2) of specifically binding to an antigen selected from the group consisting of human IL-1A, IL-1β, IL-1RN, IL-6, BLys, APRIL, activin A, TNF alpha, a BMP, BMP2, BMP7, BMP9, BMP10, GDF8, GDF11, RANKL, TRAIL, VEGFA, VEGFB or PGF; optionally the multimer comprises a cytokine amino acid sequence (eg, C-terminal to a TD), such as IL-2 or an IL2-peptide; and the multimer, octamer, dodecamer, hexadecamer or 20-mer is for treating or preventing a cancer in a human subject. In an example the said effector or protein domain is capable of binding to such an antigen; optionally the multimer comprises a cytokine amino acid sequence (eg, C-terminal to a TD), such as IL-2 or an IL2-peptide; and the multimer, tetramer, octamer, dodecamer, hexadecamer or 20-mer is for treating or preventing a cancer in a human subject.

[0390] 30. A multimer (eg, a dimer, trimer, tetramer, octamer, dodecamer, hexadecamer or 20-mer) of P1 as defined in Aspect 28; or of P1 paired with P2 as defined in Aspect 29; or a plurality of said multimers, optionally wherein the multimer is according to any one of aspects 1 to 24.

[0391] Preferably the multimer is a tetramer of the engineered polypeptide and/or effector domain. In one example, the plurality of tetramers are not in mixture with monomers, dimers or trimers of the polypeptide,

[0392] In one example the multimer, eg, tetramer, is a capable of specifically binding to two different pMHC.

[0393] 31. A nucleic acid encoding an engineered polypeptide or monomer of any one of Aspects 27 to 29, optionally wherein the nucleic acid is comprised by an expression vector for expressing the polypeptide.

[0394] In an example, the nucleic acid is a DNA, optionally operably connected to or comprising a promoter for expression of the polypeptide or monomer. In another example the nucleic acid is a RNA (eg, mRNA).
[0395] 32. A eukaryotic host cell comprising the nucleic acid or vector of Aspect 31 for intracellular and/or secreted expression of the multimer, tetramer, octamer, dodecamer, hexadecamer or 20-mer, engineered polypeptide or monomer of any one of Aspects 1 to 24.
[0396] 33. Use of a nucleic acid or vector according to aspect 31 in a method of manufacture of protein multimers for producing intracellularly expressed and/or secreted multimers, wherein the method comprises expressing the multimers in and/or secreting the multimers from eukaryotic cells comprising the nucleic acid or vector.
[0397] 34. Use of a nucleic acid or vector according to aspect 31 in a method of manufacture of protein multimers for producing glycosylated multimers in eukaryotic cells comprising the nucleic acid or vector.

[0398] Mammalian glycosylation of the invention is useful for producing medicines comprising or consisting of the multimers, tetramer, octamer, dodecamer, hexadecamer or 20-merof the invention for medical treatment or prevention of a disease or condition in a mammal, eg, a human. The invention thus provides such a method of use as well as the multimer, tetramer, octamer, dodecamer, hexadecamer or 20-merof the invention for this purpose. Similarly, intracellular and/or secreted expression in one or more host cells (or cell lines thereof) that are mammalian according to the invention is useful for producing such medicines. Particularly useful is such expression in HEK293, CHO or Cos cells as these are commonly used for production of medicaments.

[0399] In an embodiment, the invention comprises a detergent or personal healthcare product comprising a multimer, tetramer, octamer, dodecamer, hexadecamer or 20-merof the invention. In an embodiment, the invention comprises a foodstuff or beverage comprising a multimer, tetramer, octamer, dodecamer, hexadecamer or 20-merof the invention.

[0400] In an example, the multimer, monomer, dimer, trimer, tetramer, octamer, dodecamer, hexadecamer or 20-mer, polypeptide, composition, mixture, use or method of the present invention is for an industrial or domestic use, or is used in a method for such use. For example, it is for or used in agriculture, oil or petroleum industry, food or drink industry, clothing industry, packaging industry, electronics industry, computer industry, environmental industry, chemical industry, aeorspace industry, automotive industry, biotechnology industry, medical industry, healthcare industry, dentistry industry, energy industry, consumer products industry, pharmaceutical industry, mining industry, cleaning industry, forestry industry, fishing industry, leisure industry, recycling industry, cosmetics industry, plastics industry, pulp or paper industry, textile industry, clothing industry, leather or suede or animal hide industry, tobacco industry or steel industry.
[0401] 35. A mixture comprising (i) a eukaryotic cell line encoding an engineered polypeptide according to any one of Aspects 27 to 29; and (ii) multimers, tetramers, octamers, dodecamers, hexadecamers or 20-mersas defined in any one of Aspects 1 to 24.
[0402] 36. The mixture of Aspect 35, wherein the cell line is in a medium comprising secretion products of the cells, wherein the secretion products comprise said multimers, tetramers, octamers, dodecamers, hexadecamers or 20-mers.
[0403] 37. The multimer, tetramer, octamer, dodecamer, hexadecamer or 20-merof any one of aspects 1 to 24 for medical use.
[0404] 38. A method producing
   [0405] (a) TCR V domain multimers, the method comprising the soluble and/or intracellular expression of TCR V-NHR2 TD or TCR V- p53 TD fusion proteins expressed in eukaryotic cells, the method optionally comprising isolating a plurality of said multimers;
   [0406] (b) antibody V domain multimers, the method comprising the soluble and/or intracellular expression of antibody V (eg, a single variable domain)-NHR2 TD or V- p53 TD fusion proteins expressed in eukaryotic cells, the method optionally comprising isolating a plurality of said multimers;
   [0407] (c) incretin peptide (eg, GLP-1, GIP or insulin) multimers, the method comprising the soluble and/or intracellular expression of incretin peptide-NHR2 TD or incretin peptide-p53 TD fusion proteins expressed in eukaryotic cells, such as HEK293T cells; the method optionally comprising isolating a plurality of said multimers; or
   [0408] (d) peptide hormone multimers, the method comprising the soluble and/or intracellular expression of peptide hormone-NHR2 TD or peptide hormone- p53 TD fusion proteins expressed in eukaryotic cells, such as HEK293T cells; the method optionally comprising isolating a plurality of said multimers.
[0409] 39. Use of self-associating tetramerisation domains (TD) (eg, NHR2 TD, p53 TD, p63 TD or p73 TD or a homologue or orthologue thereof) in a method of the manufacture of a tetramer of polypeptides, for producing a higher yield of tetramers versus monomer and/or dimer polypeptides.
[0410] 40. Use of an engineered polypeptide in a method of the manufacture of a tetramer of a polypeptide comprising multiple copies of a protein domain or peptide, for producing a higher yield of tetramers versus monomer and/or dimer polypeptides, wherein the engineered polypeptide comprises one or more copies of said protein domain or peptide and further comprises a self-associating tetramerisation domains (TD) (eg, NHR2 TD, p53 TD, p63 TD or p73 TD or a homologue or orthologue).
[0411] 41. Use of self-associating tetramerisation domains (TD) (eg, NHR2 TD, p53 TD, p63 TD or p73 TD or a homologue or orthologue thereof) in a method of the manufacture of a tetramer of a polypeptide, for producing a plurality of tetramers that are not in mixture with monomers, dimers or trimers.
[0412] 42. Use of an engineered polypeptide in a method of the manufacture of a tetramer of a polypeptide comprising multiple copies of a protein domain or peptide, for producing a plurality of tetramers that are not in mixture with monomers, dimers or trimers, wherein the engineered polypeptide comprises one or more copies of said protein domain or peptide and further comprises a self-associating tetramerisation domains (TD) (eg, NHR2 TD, p53 TD, p63 TD or p73 TD or a homologue or orthologue).
[0413] 43. The use of any one of Aspects 39 to 42, wherein the yield of tetramers is at least 10, 20, 30, 40 or 50x the yield of monomers and/or dimers.
[0414] 44. The use of any one of Aspects 39 to 43, wherein the ratio of tetramers produced : monomers and/or dimers produced in the method is at least 90:10 (eg, at least 95:5 or 98:2, or 99:1).
[0415] 45. The use of any one of Aspects 39 to 44, wherein each monomer has a size of no more than 40, 35, 30, 25 or 20 kDa.
[0416] 46. The use of any one of Aspects 39 to 45, wherein each tetramer has a size of no more than 200, 160, 155 or 150 kDa.
[0417] 47. The use of any one of Aspects 39 to 46, wherein the method comprises expressing the tetramers from a eukaryotic cell line.
[0418] 48. A multivalent heterodimeric soluble T cell receptor capable of binding pMHC complex comprising:
   [0419] (i) TCR extracellular domains;
   [0420] (ii) immunoglobulin constant domains; and
   [0421] (iii) an NHR2 multimerisation domain of ETO.
[0422] 49. A multimeric immunoglobulin, comprising
   [0423] (i) immunoglobulin variable domains; and
   [0424] (ii) an NHR2 multimerisation domain of ETO.
[0425] 50. A method for assembling a soluble, multimeric polypeptide, comprising:
   [0426] (a) providing a monomer of the said multimeric polypeptide, fused to an NHR2 domain of ETO;
   [0427] (b) causing multiple copies of said monomer to associate, thereby obtaining a multimeric, soluble polypeptide.

[0428] The invention further provides
[0429] (i) A monomer as shown in FIG. 1;
[0430] (ii) A homodimer as shown in FIG. 1;
[0431] (iii) A homotetramer as shown in FIG. 1;
[0432] (iv) A monomer² as shown in FIG. 2;
[0433] (v) A homodimer² as shown in FIG. 2;
[0434] (vi) A homotetramer² as shown in FIG. 2;
[0435] (vii) A monomer as shown in FIG. 11a;
[0436] (viii) A homodimer as shown in FIG. 11a;
[0437] (ix) A homotetramer as shown in FIG. 11a;
[0438] (x) A monomer as shown in FIG. 12a;
[0439] (xi) A homodimer as shown in FIG. 12a;
[0440] (xii) A homotetramer as shown in FIG. 12a;
[0441] (xiii) A monomer² as shown in FIG. 13a;
[0442] (xiv) A homodimer² as shown in FIG. 13a;
[0443] (xv) A homotetramer² as shown in FIG. 13a; or
[0444] (xvi) A multimeric protein comprising any one of (i) to (xv) (eg, any one of Quads 3, 4, 12, 13, 14, 15, 16 and 17) or a multimer of any protein shown in FIG. 21 (excluding any leader or tag);
[0445] (xvii) A plurality of multimers of (xvi); or
[0446] (xviii) A pharmaceutical composition comprising any one of (i) to (xvii) and a pharmaceutically acceptable carrier, diluent or excipient.

[0447] The invention also provides
[0448] (i) A tetravalent or octavalent antibody V molecule;
[0449] (ii) A tetravalent or octavalent antibody Fab molecule;
[0450] (iii) A tetravalent or octavalent antibody dAb molecule;
[0451] (iv) A tetravalent or octavalent antibody scFv molecule;
[0452] (v) A tetravalent or octavalent antibody TCR V molecule; or
[0453] (vi) A tetravalent or octavalent antibody scFv molecule;
Wherein the molecule is
[0454] (a) soluble in aqueous solution (eg, a solution or cell culture medium disclosed herein) and/or;
[0455] (b) capable of being intracellularly and/or extracellularly expressed by HEK293 cells.

[0456] The invention provides a claim multimer (eg, tetramer) of NHR2 or p53 (or another TD disclosed herein) fused at its N- and/or C-terminus to an amino acid sequence (eg, a peptide, protein domain or protein) that is not an NHR2 sequence. For example, sequence is selected from a TCR (eg, TCRα, TCRβ, Cα or Cβ), cytokine (eg, interleukin, eg, IL-2, IL-12, IL-12 and IFN), antibody fragments (eg, scFv, dAb or Fab) and a antibody domain (eg, V or C domain, eg, VH, VL, V_{K}, Vλ, CH, CH1, CH2, CH3, hinge, C_{K} or Cλ domain). Optionally, the multimer is the molecule is
[0457] a) soluble in aqueous solution (eg, a solution or cell culture medium disclosed herein) and/or;
[0458] b) capable of being intracellularly and/or extracellularly expressed by HEK293 cells.

[0459] The invention provides:-
[0460] (i) Use of NHR2 or p53 (or another TD disclosed herein) for the manufacture of a polypeptide for soluble expression of a multimer of the polypeptide from a cell, eg, a eukaryotic cell, eg, a mammalian, HEK293, CHO or Cos cell.
[0461] (ii) Use of NHR2 or p53 (or another TD disclosed herein) for the manufacture of a polypeptide for intracellular expression of a multimer of the polypeptide in a cell, eg, a eukaryotic cell, eg, a mammalian, HEK293, CHO or Cos cell.
[0462] (iii) A cell comprising an intracelllular expression product, wherein the product comprises a multimer of a polypeptide comprising NHR2 or p53 (or another TD disclosed herein) fused at its N- and/or C-terminus to an amino acid sequence (eg, a peptide, protein domain or protein) that is not an NHR2 sequence.
[0463] (iv) Use of NHR2 as a promiscuous tetramerisation domain for tetramerising peptides, protein domains, polypeptides or proteins in tha manufacture of multimers that are intracellularly and/or solubly expressed from host cell.

[0464] Optionally, the amino acid is an amino acid sequence of a human peptide, protein domain or protein,eg, a TCR (eg, TCRα, TCRβ, Cα or Cβ), cytokine (eg, interleukin, eg, IL-2, IL-12, IL-12 and IFN), antibody fragments (eg, scFv, dAb or Fab), or an antibody domain (eg, V or C domain, eg, VH, VL, V_{K}, Vλ, CH, CH1, CH2, CH3, hnige, C_{K} or Cλ domain).

[0465] Optionally, the or each polypeptide comprises a polypeptide selected from the group consisting of Quad 1-46 (ie, a polypeptide as shown in FIG. 21 but excluding any leader or tag sequence). Optionally, the invention provides a multimer (eg, a dimer, trimer, tetramer, pentamer, hexamer, septamer or octamer, preferably a tetramer or octamer) of a polypeptide selected from the group consisting of such Quad 1-46 (ie, 2, 3, 4, 5, 6, 7 or 8 copies of such a polypeptide), eg, for medical or diagnostic use, eg, medical use for treating or preventing a disease or condition in a human or animal (eg, a human).

[0466] Optionally, the or each polypeptide comprises a polypeptide (excluding any leader or tag sequence) that is encoded by a nucleotide sequence selected from the group consisting of SEQ ID NOs: 13-50. Optionally, the or each polypeptide comprises a polypeptide (excluding any leader or tag sequence) that comprises an amino acid sequence selected from the group consisting of SEQ ID NOs: 83-115. Optionally, the invention provides a multimer (eg, a dimer, trimer, tetramer, pentamer, hexamer, septamer or octamer, preferably a tetramer or octamer) of such a polypeptide, eg, for medical or diagnostic use, eg, medical use for treating or preventing a disease or condition in a human or animal (eg, a human).

[0467] In an example, the TD is a TD comprised by any one of SEQ ID NOs: 1-9. In an example, the TD is a TD comprising SEQ ID NO: 10 or 126. In an example, the TD is encoded by SEQ ID NO: 124 or 125. In an example, the amino acid sequence of each TD is SEQ ID NO: 10 or 126 or is at least 80, 85, 90, 95, 96m 97, 98 or 99% identical to SEQ ID NO: 10 or 126.

[0468] In an example, the TD is a TD comprising SEQ ID NO: 120 or 123. In an example, the TD is encoded by SEQ ID NO: 116 or 119. In an example, the amino acid sequence of each TD is SEQ ID NO: 120 or 123 or is at least 80, 85, 90, 95, 96m 97, 98 or 99% identical to the SEQ ID NO: 120 or 123.

[0469] Optionally, the domain or peptide comprised by the engineered polypeptide or monomer comprises an amino acid selected from SEQ ID NOs: 51-82.

### High Purity Tetramers

[0470] As exemplified herein, the invention in one configuration is based on the surprising realization that tetramerisation domains (TD), eg, p53 tetramerisation domain (p53 TD), can be used to preferentially produce tetramers of effector domains over the production of lower-order structures such as dimers and monomers. This is particularly useful for secretion of tetramers is desirable yields from mammalian expression cell lines, such as CHO, HEK293 and Cos cell lines. The invention is also particularly useful for the production of tetramers no more than 200, 160, 155 or 150 kDa in size.

[0471] Thus, the invention provides the following Concepts:-

### Concepts

[0472] The following Concepts are not to be interpreted as Claims. The Claims start after the Examples section.

[0473] 1. Use of a tetramerisation domain (TD) (eg, p53 tetramerisation domain (p53 TD) or NHR2 TD) or a homologue or orthologue thereof in a method of the manufacture of a tetramer of polypeptides, for producing a higher yield of tetramers versus monomer and/or dimer polypeptides.

[0474] The monomers and dimers comprise one or two copies of the TD, homologue or orthologue respectively

[0475] In an example, the TD, orthologue or homologue is a human domain.

[0476] Herein, the TD is a human TD or a homologue, eg, a TD selected from any of the p53 TD sequences disclosed in UniProt (www.uniprot.org), for example the p53 TD is a TD disclosed in Table 13. In an example, the homologue is a p53TD of a non-human animal species, eg, a mouse, rat, horse cat or dog p53TD. See FIG. 32, which shows the high level of conservation between p53 TDs of different species, which supports the use of non-human p53 TDs as an alternative to human p53 TDs. In an example, the homologue is a p53TD of a non-human mammalian species. In an example, the homologue is identical to human p53 TD with the exception of up to 10, 9, 8, 7, 6, 5, 4, 3, 2 or 1 amino acid change(s).

[0477] In an example, the yield of tetramers is higher than the yield of monomers; In an example, the yield of tetramers is higher than the yield of dimers; In an example, the yield of tetramers is higher than the yield of trimers; In an example, the yield of tetramers is higher than the yield of monomers and dimers; In an example, the yield of tetramers is higher than the yield of monomers and trimers; In an example, the yield of tetramers is higher than the yield of monomers, dimers and trimers

[0478] For example, the TD is the TD of p53 isoform 1. In an example, the TD comprises or consists of an amino acid sequence that is identical to positions 325 to 356 (or 319-360; or 321-359) of human p53 (eg, isoform 1). Optionally, the TD, orthologue or homologue comprises or consists of an amino acid sequence that is at least 80, 85, 90, 95, 96, 97, 98 or 99% identical to SEQ ID NO: 10, 126, 11 or 12. For example the sequence is identical to said selected sequence. Optionally, the TD, orthologue or homologue comprises or consists of an amino acid sequence that is at least 80, 85, 90, 95, 96, 97, 98 or 99% identical to SEQ ID NO: 120, 121, 122 or 123. For example the sequence is identical to said selected sequence.
[0479] 2. The use of Concept 1, wherein first, second, third and fourth copies of an identical TD or homologue or orthologue thereof is used.
[0480] 3. The use of any preceding Concept, wherein the TD is a NHR2, p53, p63 or p73 tetramerisation domain.
For example, the TD is a p53 TD. In an example, the TD is an orthologue or homologue of a p53 TD, eg, a human p53 TD.
[0481] 4. The use of any preceding Concept, wherein the yield of tetramers is at least 10x the yield of monomers and/or dimers.

[0482] Optionally, the yield is at least 2× 3×, 4×, 5×, 6×, 7×, 8×, 9×, or 10× the yield of monomers and/or dimers. Optionally, the ratio of tetramers produced : monomers and/or dimers is at least 90:10, eg, at least 95:5; or 96:4; or 97:3; or 98:2; or 99:1. Optionally only tetramers are produced.

[0483] In an embodiment, each domain comprised by each monomer, dimer or tetramer is a human domain; and optionally the monomer, dimer or tetramer does not comprise non-human amino acid sequences or linkers.
[0484] 5. The use of any preceding Concept, wherein the ratio of tetramers produced : monomers and/or dimers produced in the method is at least 90:10 (ie, 9× the amount of monomers; 9× the amount of dimers; or 9× the amount of the combination of monomers and dimers).
[0485] 6. The use of Concept 4 or 5, wherein the yield or ratio is determinable or determined by obtaining a sample of the product of the tetramer manufacture method, using a protein separation technique on the sample to resolve tetramers, monomers and dimers and comparing the amount of tetramers with the amount of monomers and dimers.

[0486] Amounts of tetramers, monomers, dimers and trimers can be determined, for example, using Western Blot analysis of a gel described herein, eg, a native gel, ie, a gel not under denatured conditions, such as in the absence of SDS.
[0487] 7. The use of Concept 4 or 5, wherein the yield or ratio is determinable or determined by
   [0488] (a) Obtaining a sample of the product of the tetramer manufacture method;
   [0489] (b) Carrying out polyacrylamide gel electrophoresis (PAGE) under non-reducing conditions to resolve the sample into a band corresponding to said tetramers and a band corresponding to said monomers and/or a band corresponding to said dimers; and
   [0490] (c) Comparing the tetramer band with the monomer and/or dimer band(s) to determine said yield or ratio, eg, by comparing the relative band intensities and/or band sizes.
[0491] 8. The use of Concept 4 or 5, wherein the yield or ratio is determinable or determined by
   [0492] (d) Obtaining a sample of the product of the tetramer manufacture method;
   [0493] (e) Carrying out polyacrylamide gel electrophoresis (PAGE) under non-reducing conditions to resolve the sample into a band corresponding to said tetramers, eg, wherein the gel is under non-denatured conditions (eg, in the absence of sodium dodecylsuphate (SDS);
   [0494] (f) Determining that there is no band corresponding to said monomers and/or no band corresponding to said dimers.
[0495] 9. The use of Concept 7 or 8, comprising
   [0496] (g) Obtaining a second sample of the product of the tetramer manufacture method;
   [0497] (h) Carrying out polyacrylamide gel electrophoresis (PAGE) under reducing conditions to resolve the second sample into a band corresponding to said monomers and/or a band corresponding to said dimers, eg, wherein the gel is under non-denatured conditions (eg, in the absence of sodium dodecylsuphate (SDS); and
   [0498] (i) Comparing the gel produced by step (h) with the gel of step (b) or (e) to determine the position of monomer and/or dimer band(s) in the gel of step (b) or where such gels would be expected in the gel of step (e).
[0499] 10. The use of any preceding Concept, wherein each monomer has a size of no more than 40 kDa.

[0500] For example, the monomer has a size of no more than 35, 30, 25, 24, 23, 22, 21 or 20 kDa

[0501] 11. The use of any preceding Concept, wherein each tetramer has a size of no more than 150 kDa.

[0502] For example, the tetramer has a size of no more than 80, 90, 100, 110, 120, 130 or 140 kDa.

[0503] 12. The use of any preceding Concept, wherein the method comprises expressing the tetramers from a mammalian cell line, eg, a HEK293, CHO or Cos cell line.

[0504] For example, the cell line is a HEK293 (eg, HEK293T) cell line. In the alternative, the cell line is a yeast (eg, Saccharomyces or Pichia, eg, P pastoris) or bacterial cell line.

[0505] 13. The use of any preceding Concept, wherein the method comprises secreting the tetramers from a mammalian cell line, eg, a HEK293, CHO or Cos cell line.

[0506] Thus, advantageously in an example, the use or tetramer is for expression from a mammalian cell line (eg, a HEK293, CHO or Cos cell line) or a eukaryotic cell line. This is useful for large-scale manufacture of the products, eg, tetramers, of the invention.

[0507] For example, the cell line is a HEK293 (eg, HEK293T) cell line. In the alternative, the cell line is a yeast (eg, Saccharomyces or Pichia, eg, P pastoris) or bacterial cell line.
[0508] 14. The use of any preceding Concept, wherein each polypeptide or monomer comprises a said TD, homologue or orthologue and one or more protein effector domains, such as one or more antibody domains, eg, one or more antibody domains forming an antigen binding site.
[0509] 15. The use of Concept 14, wherein the polypeptide comprises one or more of
   [0510] (i) an antibody single variable domain (dAb or VHH or Nanobody™) that is capable of specifically binding an antigen;
   [0511] (ii) an scFv that is capable of binding an antigen or an scTCR that is capable of binding pMHC;
   [0512] (iii) a Fab that is capable of binding an antigen; or
   [0513] (iv) a TCR variable domain or pMHC binding site.
[0514] 16. The use of any preceding Concept, wherein each polypeptide or monomer comprises a said TD, homologue or orthologue and one or more incretin, insulin, GLP-1 or Exendin-4 domains.
[0515] 17. The use of any preceding Concept, wherein each polypeptide or monomer comprises a said TD, homologue or orthologue; and first and second antigen binding sites.
[0516] 18. The use of Concept 17, wherein each binding site is provided by
   [0517] (i) an antibody single variable domain (dAb or VHH or Nanobody™) that is capable of specifically binding an antigen;
   [0518] (ii) an scFv that is capable of binding an antigen or an scTCR that is capable of binding pMHC;
   [0519] (iii) a Fab that is capable of binding an antigen; or
   [0520] (iv) a TCR variable domain or pMHC binding site.
[0521] 19. The use of Concept 18, wherein each binding site is provided by an antibody single variable domain.
[0522] 20. The use of any one of Concepts 14 to 18, wherein the TD, homologue or orthologue is directly fused to said further domain(s).
[0523] 21. The use of Concept 20, wherein each monomer or polypeptide comprises the TD, homologue or orthologue fused directly or via a peptide linker to the C-terminal of a said further domain.
[0524] 22. A tetramer of polypeptides, wherein each polypeptide comprises
   [0525] (i) a tetramerisation domain (TD) (eg, a p53 TD or a NHR2 TD) or a homologue or orthologue thereof;
   [0526] (ii) one or more protein effector domains; and
   [0527] (iii) optionally a linker linking (i) to (ii) (eg, linking the C-terminus of (ii) to the N-terminus of (i));
   wherein optionally each tetramer has a size of no more than 150 or 200 kDa.

[0528] For example, the tetramer has a size of no more than 80, 90, 100, 110, 120, 130 or 140 kDa. In an example, any multimer, dimer, trimer, tetramer, octamer, dodecamer, hexadecamer or 20-merherein has a size of at least 60 or 80 kDa; this may be useful for example to increase half -life in a human or animal subject administered with the multimer, dimer, trimer, tetramer, octamer, dodecamer, hexadecamer or 20-mer (eg, to treat or prevent a disease or condition in the subject). Sizes in these ranges may be above the renal filtration size.

[0529] In an alternative, the invention provides a monomer, dimer, octamer, dodecamer, hexadecamer or 20-merinstead of a tetramer.
[0530] 23. The tetramer of Concept 22, wherein each polypeptide comprises one or more of
   [0531] (i) an antibody single variable domain (dAb or VHH or Nanobody™) that is capable of specifically binding an antigen;
   [0532] (ii) an scFv that is capable of binding an antigen or an scTCR that is capable of binding pMHC;
   [0533] (iii) a Fab that is capable of binding an antigen; or
   [0534] (iv) a TCR variable domain or pMHC binding site.
[0535] 24. The tetramer of Concept 22 or 23, wherein each polypeptide comprises a said TD, homologue or orthologue and one or more incretin, insulin, GLP-1 or Exendin-4 domains.
[0536] 25. The tetramer of Concept 22 or 23, wherein each polypeptide comprises a said TD, homologue or orthologue; and first and second antigen binding sites.
[0537] 26. The tetramer of Concept 25, wherein each binding site is provided by (i) an antibody single variable domain (dAb or VHH or Nanobody™) that is capable of specifically binding an antigen;
[0538] (ii) an scFv that is capable of binding an antigen or an scTCR that is capable of binding pMHC;
[0539] (iii) a Fab that is capable of binding an antigen; or
[0540] (iv) a TCR variable domain or pMHC binding site.
[0541] 27. The tetramer of Concept 26, wherein each binding site is provided by an antibody single variable domain.
[0542] 28. The tetramer of any one of Concepts 22 to 27, wherein the TD, homologue or orthologue is directly fused to said effector domain(s).
[0543] 29. The tetramer of any one of Concepts 22 to 27, wherein each polypeptide comprises the TD, homologue or orthologue fused directly or via a peptide linker to the C-terminal of a said effector domain.

[0544] In an embodiment, each polypeptide comprises only 2 (ie, only a first and a second, but not a third) effector domains or only 2 dAbs, VHH, scFvs, scTCRs, Fabs or antigen binding sites.

[0545] 30. A pharmaceutical composition comprising a tetramer of any one of Concepts 22 to 29 and a pharmaceutically acceptable carrier, diluent or excipient.

[0546] Optionally the composition is comprised by a sterile medical container or device, eg, a syringe, vial, inhaler or injection device.
[0547] 31. A cosmetic, foodstuff, beverage, cleaning product, detergent comprising a tetramer of any one of Concepts 22 to 29.
[0548] 32. A mixture comprising a cell line (eg, a mammalian cell line, eg, a HEK293, CHO or Cos cell line) encoding a polypeptide as recited in any preceding Concept; and tetramers as defined in any preceding Concept.

[0549] Optionally, the mixture is comprised by a sterile container.
[0550] 33. The mixture of Concept 32, wherein the cell line is in a medium comprising secretion products of the cells, wherein the secretion products comprise said tetramers.
[0551] 34. The mixture of Concept 33, wherein the secretion products do not comprise monomers and/or dimers as defined in any one of Concepts 1 to 31.
[0552] 35. The mixture of Concept 33, wherein the secretion products comprise said tetramers in an amount of at least 10× the amount of monomers and/or dimers.
[0553] 36. The mixture of Concept 33, wherein the secretion products comprise said tetramers in a ratio of tetramers : monomers and/or dimers of at least 90:10.
[0554] 37. A method for enhancing the yield of tetramers of an protein effector domain (eg, an antibody variable domain or binding site), the method comprising expressing from a cell line (eg, a mammalian cell, CHO, HEK293 or Cos cell line) tetramers of a polypeptide, wherein the polypeptide is as defined in any preceding Concept and comprises one or more effector domains; and optionally isolating said expressed tetramers.

[0555] The homologue, orthologue or equivalent has multimerisation or tetramerisation function.

[0556] Homologue: A gene, nucleotide or protein sequence related to a second gene, nucleotide or protein sequence by descent from a common ancestral DNA or protein sequence. The term, homologue, may apply to the relationship between genes separated by the event of or to the relationship between genes separated by the event of genetic duplication.

[0557] Orthologue: Orthologues are genes, nucleotide or protein sequences in different species that evolved from a common ancestral gene, nucleotide or protein sequence by speciation. Normally, orthologues retain the same function in the course of evolution.

[0558] In an example, the TD, orthologue or homologue is a TD of any one of proteins 1 to 119 listed in Table 2. In an example, the orthologue or homologue is an orthologue or homologue of a TD of any one of proteins 1 to 119 listed in Table 2. In an embodiment, instead of the use of a p53 tetramerisation domain (p53-TD) or a homologue or orthologue thereof, all aspects of the invention herein instead can be read to relate to the use or inclusion in a polypeptide, monomer, dimer, trimer or tetramer of aTD of any one of proteins 1 to 119 listed in Table 2 or a homologue or orthologue thereof. The TD may be a NHR2 (eg, a human NHR2) TD or an orthologue or homologue thereof. The TD may be a p63 (eg, a human p63) TD or an orthologue or homologue thereof. The TD may be a p73 (eg, a human p73) TD or an orthologue or homologue thereof. This may have one or more advantages as follows:-
[0559] secretion of tetramers from mammalian or other eukaryotic cells, eg, a mammalian cell disclosed herein such as CHO, HEK293 or Cos;
[0560] enhanced yield of secreted tetramers versus monomers;
[0561] enhanced yield of secreted tetramers versus dimers;
[0562] enhanced yield of secreted tetramers versus trimers;
[0563] enhanced yield of secreted tetramers versus monomers and dimers combined;
[0564] enhanced yield of secreted tetramers versus monomers, dimers and trimers combined;
[0565] enhanced affinity or avidity of antigen binding in tetramers comprising antigen binding sites;
[0566] enhanced tetramer production and/or expression, wherein the tetramer is no more than 200 or no more than 160 or 150 kDa in size.
In an embodiment, each polypeptide or monomer comprises one or more VH, VL or VH/VL binding sites of an antibody selected from ReoPro™; Abciximab; Rituxan™; Rituximab; Zenapax™; Daclizumab; Simulect™; Basiliximab; Synagis™; Palivizumab; Remicade™; Infliximab; Herceptin™; Trastuzumab; Mylotarg™; Gemtuzumab; Campath™; Alemtuzumab; Zevalin™; Ibritumomab; Humira™; Adalimumab; Xolair™; Omalizumab; Bexxar™; Tositumomab; Raptiva™; Efalizumab; Erbitux™; Cetuximab; Avastin™; Bevacizumab; Tysabri™; Natalizumab; Actemra™; Tocilizumab; Vectibix™; Panitumumab; Lucentis™; Ranibizumab; Soliris™; Eculizumab; Cimzia™; Certolizumab; Simponi™; Golimumab, Ilaris™; Canakinumab; Stelara™; Ustekinumab; Arzerra™; Ofatumumab; Prolia™; Denosumab; Numax™; Motavizumab; ABThrax™; Raxibacumab; Benlysta™; Belimumab; Yervoy™; Ipilimumab; Adcetris™; Brentuximab; Vedotin™; Perjeta™; Pertuzumab; Kadcyla™; Ado-trastuzumab; Gazyva™ and Obinutuzumab. In an alternative, (eg, for treating or preventing a cancer in a human) each polypeptide or monomer comprise one or more VH, VL or VH/VL binding sites of an antibody selected from ipilimumab (or YERVOY™), tremelimumab, nivolumab (or OPDIVO™), pembrolizumab (or KEYTRUDA™), pidilizumab, BMS-936559, durvalumab and atezolizumab. Optionally, the binding site of the polypeptide of the multimer comprises a VH of the binding site of the antibody and also the CH1 of the antibody (ie, in N- to C-terminal direction the VH-CH1 and SAM). In an embodiment, the polypeptide may be paired with a further polypeptide comprising (in N- to C-terminal direction a VL-CL, eg, wherein the CL is the CL of the antibody).

[0567] In an example, the tetramer comprises 4 copies of the antigen binding site of a first antibody selected from the group consisting of ipilimumab (or YERVOY™), tremelimumab, nivolumab (or OPDIVO™), pembrolizumab (or KEYTRUDA™), pidilizumab, BMS-936559, durvalumab and atezolizumab and optionally 4 copies of the antigen binding site of a second antibody selected from said group, wherein the first and second antibodies are different. For example, the first antibody is ipilimumab (or YERVOY™) and optionally the second antibody is nivolumab (or OPDIVO™) or pembrolizumab (or KEYTRUDA™). This is useful for treating or preventing a cancer in a human.

[0568] In an example, the tetramer comprises 4 copies of the antigen binding site of Avastin. In an example, the tetramer comprises 4 copies of the antigen binding site of Humira. In an example, the tetramer comprises 4 copies of the antigen binding site of Erbitux. In an example, the tetramer comprises 4 copies of the antigen binding site of Actemra™. In an example, the tetramer comprises 4 copies of the antigen binding site of sarilumab. In an example, the tetramer comprises 4 copies of the antigen binding site of dupilumab. In an example, the tetramer comprises 4 copies of the antigen binding site of alirocumab or evolocumab. In an example, the tetramer comprises 4 copies of the antigen binding site of In an example, the tetramer comprises 4 copies of the antigen binding site of Remicade. In an example, the tetramer comprises 4 copies of the antigen binding site of Lucentis. In an example, the tetramer comprises 4 copies of the antigen binding site of Eylea™. Such tetramers are useful for administering to a human to treat or prevent a cancer. Such tetramers are useful for administering to a human to treat or prevent an ocular condition (eg, wet AMD or diabetic retinopathy, eg, when the binding site is an Avastin, Lucentis or Eylea site). Such tetramers are useful for administering to a human to treat or prevent angiogenesis.

[0569] In an example, the tetramer comprises 4 copies of insulin. In an example, the tetramer comprises 4 copies of GLP-1. In an example, the tetramer comprises 4 copies of GIP. In an example, the tetramer comprises 4 copies of Exendin-4. In an example, the tetramer comprises 4 copies of insulin and 4 copies of GLP-1. In an example, the tetramer comprises 4 copies of insulin and 4 copies of GIP. In an example, the tetramer comprises 4 copies of insulin and 4 copies of Exendin-4. In an example, the tetramer comprises 4 copies of GLP-1 and 4 copies of Exendin-4. Such tetramers are useful for administering to a human to treat or prevent diabetes (eg, Type II diabetes) or obesity.

### Example Antigens

[0570] The polypeptide, multimer may bind to one or more antigens or epitopes, or each of the binding sites herein (eg, dAb or scFv binding sites) herein may bind to an antigen or epitope. In an example, an (or each) antigen herein is selected from the following list. In an example, an (or each) epitope herein is an epitope of an antigen selected from the following list.

[0571] Activin type-II receptor; Activin type-IIB receptor; ADAM11; ADAM12; ADAM15; ADAM17; ADAM18; ADAM19; ADAM1A; ADAM1B; ADAM2; ADAM20; ADAM21; ADAM22; ADAM23; ADAM24P; ADAM28; ADAM29; ADAM30; ADAM32; ADAM33; ADAM3A; ADAM3B; ADAM5; ADAM6; ADAM7; ADAM8; ADAM9; ADORA2A; AKT; ALK; alpa-4 integrin; alpha synuclein; anthrax protective antigen; BACE1; BCMA; beta amyloid; BRAF; BTLA; BTNL2; CCR4; CCR5; CD126; CD151; CD16; CD160; CD19; CD20; CD22; CD226; CD244; CD27; CD274 (PDL1); CD276; CD28; CD3; CD30; CD300A; CD300C; CD300E; CD300LB; CD300LF; CD33; CD38; CD3; CD3 epsilon; CD3 delta; CD3 gamma; CD40; CD40L; CD47; CD48; CD5; CD52; CD59; CD6; CD70; CD72; CD73; CD80; CD81; CD84; CD86; CD96; CDK4/6; CEA; CEACAM1; CEACAM3; CGRP receptor; CLEC12A; CLEC1B; CLEC4A; CLEC5A; CLEC7A; Clostridium difficile toxin ; cMET; Complement C5 factor; Complement factor D; CSF1R; CSF2RA; CTAG1B; CTLA4; CXCL12; CXCR2; CXCR4; DR4; DR5; EDA; EDA2R; EGFR; EGFRvIII; EMR1; ENTPD1; EpCAM; Factor IX; Factor X; Factor VII; FAP; FAS; FCAR; FCER1G; FCER2 ; TFR2; 4-1BB; FCGR2A; FCGR2B; FCGR3A; FCGR3B; FCRL1; FCRL3; FCRL4; FCRL6; FGRF1/2/3; FLT3; GAL; GEM; GITR; GITRL; GM-CSF; GM-CSF receptor; GP IIb IIIa; gpNMB; TIM3; HDAC1; HER-2; HER3; HFE; HHLA2; Histone H1 modulator; HLA-C; HLA-G; HMGB1; HMMR; HVEM; ICAM-1; ICOS; ICOSL; IDO1; IFNG; IL-1 beta; IL-12; IL-13; IL-2; IL-22R; IL-23; IL-23a; IL-24; IL-2R; IL-34; IL-8; IL10; IL11; IL13; IL17A; IL17D; IL22; IL2RA; IL36G; IL4; IL4a; IL5; IL6; Immunoglobulin E; Immunoglobulin E; Immunoglobulin G; INHBA; INHBB; Interferon type I receptor; INF-a-2a/2b; INF-b-1a/1b; ITGA2B; ITGB3; KIR; KIR2DL1; KIR2DL2; KIR2DL3; KIR2DL4; KIR2DL5A; KIR3DL1; KIR3DL3 ;KIR3DS1; KIT; KLRC1; KLRC2; KLRF1; KLRG1 ;KLRK1 ;KRAS; LAG3; LAIR1; LAIR2; LFA-1; LIGHT; LILRA1; LILRA2; LILRA3; LILRA4; LILRA5; LILRA6; LILRB1; LILRB2; LILRB3; LILRB4; LILRB5 ;LILRP1; LILRP2; LTA; LTBR; LY9; MadCam; MAGE-C1; MAGE-C2; MARCO; MEK-½; MIA3; MIC; MICA; MICB; MMP9; MS4A1; MS4A2; mTOR; MUC1; MUCIN-1; Nav1.7; Nav1.8; NCR1; NCR2; NCR3; NGF; NGFR; NT5E; NY-ESO-1; OX40; OX40L; p53; PARP; PCSK9; PD-1; PDCD1LG2; PDCD6; PDGF receptor alpha; PECAM1; PI3K delta; PILRA; PPP1R1B; PSMA; PTPN6; PVR; PVRL2; PVRL3; RANKL; Respiratory syncytial virus protein; SIGLEC10; SIGLEC12; SIGLEC15; SIGLEC5; SIGLEC6; SIGLEC7; SIGLEC9; SIRPA; SIRPB1; SLAMF1; SLAMF6; SLAMF7; SLAMF8; SNCA; SOD1; STAT3; STING; SURVIVIN; TARM1; Tau; TDP43; TfR1; TGF-b; TGM2; TIGIT; TIM-3; TLR-4; TLR03; TMEM30a; TMIGD2; TNFa; TNFRSF10A; TNFRSF10B; TNFRSF10C; TNFRSF10D; TNFRSF11A; TNFRSF11B; TNFRSF12A; TNFRSF13B; TNFRSF13C; TNFRSF14; TNFRSF17; TNFRSF18; TNFRSF19; TNFRSF21; TNFRSF4; TNFRSF6B; TNFRSF8; TNFRSF9; TNFSF10; TNFSF11; TNFSF12; TNFSF13; TNFSF13B; TNFSF14; TNFSF15; TNFSF18; TNFSF4; TNFSF8; TNFSF9; Transmembrane glycoprotein NMB modulator; TREML1; TREML2; TSLP; VEGF; VEGF-2R; VEGF1; VEGFA; VEGFL; VEGFR; Viral envelope glycoprotein; Viral protein haemagglutinin; VISTA; VSIG4; VSTM1; VTCN1; and WEE-1. In an example, an antigen herein is a PCSK9, eg, human PCSK9; optionally the multimer has 4, 8, 12 or 16 copies an anti- PCSK9 binding site (eg, a dAbs).

[0572] An example antigen is a toxin, such as a snake venom toxin, eg, wherein a multimer of the invention is administered (such as systemically or by IV injection) to a human or animal subject and the antigen binding sites comprised by the multimer specifically bind to the toxin in the subject. Preferably, each binding site or domain of the multimer is a dAb (eg, a Nanobody™). For example, each snake venom toxin antigen binding site of the multimer of the invention is a C33 single domain VH as disclosed in FIG. 4 of PLoS One. 2013 Jul 22;8(7):e69495. doi: 10.1371/journal.pone.0069495; “In vivo neutralization of α-cobratoxin with high-affinity llama single-domain antibodies (VHHs) and a VHH-Fc antibody”, Richard et al, the amino acid of which as discloed in said FIG. 4 is incorporated herein in its entirety by reference for possible use in the present invention as a binding site or domain or dAb or Nanobody or VHH or VH. For example, each snake venom toxin antigen binding site of the multimer of the invention is a C15 single domain VH as disclosed in FIG. 4 of Richard et al, the amino acid of which as discloed in said FIG. 4 is incorporated herein in its entirety by reference for possible use in the present invention as a binding site or domain or dAb or Nanobody or VHH or VH. For example, each snake venom toxin antigen binding site of the multimer of the invention is a C7 single domain VH as disclosed in FIG. 4 of Richard et al, the amino acid of which as discloed in said FIG. 4 is incorporated herein in its entirety by reference for possible use in the present invention as a binding site or domain or dAb or Nanobody or VHH or VH. For example, each snake venom toxin antigen binding site of the multimer of the invention is a C13 single domain VH as disclosed in FIG. 4 of Richard et al, the amino acid of which as discloed in said FIG. 4 is incorporated herein in its entirety by reference for possible use in the present invention as a binding site or domain or dAb or Nanobody or VHH or VH. For example, each snake venom toxin antigen binding site of the multimer of the invention is a C19 single domain VH as disclosed in FIG. 4 of Richard et al, the amino acid of which as discloed in said FIG. 4 is incorporated herein in its entirety by reference for possible use in the present invention as a binding site or domain or dAb or Nanobody or VHH or VH. For example, each snake venom toxin antigen binding site of the multimer of the invention is a C34 single domain VH as disclosed in FIG. 4 of Richard et al, the amino acid of which as discloed in said FIG. 4 is incorporated herein in its entirety by reference for possible use in the present invention as a binding site or domain or dAb or Nanobody or VHH or VH. For example, each snake venom toxin antigen binding site of the multimer of the invention is a C31 single domain VH as disclosed in FIG. 4 of Richard et al, the amino acid of which as discloed in said FIG. 4 is incorporated herein in its entirety by reference for possible use in the present invention as a binding site or domain or dAb or Nanobody or VHH or VH. For example, each snake venom toxin antigen binding site of the multimer of the invention is a C20 single domain VH as disclosed in FIG. 4 of Richard et al, the amino acid of which as discloed in said FIG. 4 is incorporated herein in its entirety by reference for possible use in the present invention as a binding site or domain or dAb or Nanobody or VHH or VH. For example, each snake venom toxin antigen binding site of the multimer of the invention is a C2 single domain VH as disclosed in FIG. 4 of Richard et al, the amino acid of which as discloed in said FIG. 4 is incorporated herein in its entirety by reference for possible use in the present invention as a binding site or domain or dAb or Nanobody or VHH or VH. For example, each snake venom toxin antigen binding site of the multimer of the invention is a C29 single domain VH as disclosed in FIG. 4 of Richard et al, the amino acid of which as discloed in said FIG. 4 is incorporated herein in its entirety by reference for possible use in the present invention as a binding site or domain or dAb or Nanobody or VHH or VH. For example, each snake venom toxin antigen binding site of the multimer of the invention is a C42 single domain VH as disclosed in FIG. 4 of Richard et al, the amino acid of which as discloed in said FIG. 4 is incorporated herein in its entirety by reference for possible use in the present invention as a binding site or domain or dAb or Nanobody or VHH or VH. For example, each snake venom toxin antigen binding site of the multimer of the invention is a C43 single domain VH as disclosed in FIG. 4 of Richard et al, the amino acid of which as discloed in said FIG. 4 is incorporated herein in its entirety by reference for possible use in the present invention as a binding site or domain or dAb or Nanobody or VHH or VH. An example of a snake venom toxin is 3FTx, dendrotoxin or PLA2 toxin. Optionally, the toxin is an alpha-neurotoxin, eg, from Cobra.

[0573] Another example of a toxin is a blood toxin, eg, wherein a multimer of the invention is administered (such as systemically or by IV injection) to a human or animal subject and the antigen binding sites comprised by the multimer specifically bind to the toxin in the blood of the subject. These examples are useful for sequestering the toxin or for reducing the toxic effect of the toxin to the subject or to promote excretion or metabolism of the toxin.

[0574] In an example, the antigen is a viral antigen, each a capsid protein or carbohydrate (eg, a sugar). In an example, a multimer of the invention binds to a virus or virus antigen, eg, a virus selected from Table 19 wherein the virus comprises a surface antigen that is bound by the multimer; or the multimer of the invention binds to a cell or virus antigen, eg, selected from an antigen disclosed in Table 20. Binding to the virus may, for example, reduce or inhibit attachment of the virus to its host cell or infection of the cell by the virus. For example, the invention provides a method of treating or preventing (eg, reducing the risk of) a viral or cell infection in a human or animal or plant subject (eg, in a human subject), the method comprising administering a multimer of the invention to the subject wherein the multimer binds to a surface antigen of the virus, thereby inhibiting the virus from attaching to a host cell; inhibiting infection of a host cell by the virus and/or sequestering the virus in the subject (eg, to mark the bound virus for clearance from the systemic circulation or a tissue of the subject). In an alternative, For example, the invention provides a method of treating or preventing (eg, reducing the risk of) a bacterial or archaeal cell infection in a human or animal or plant subject (eg, in a human subject), the method comprising administering a multimer of the invention to the subject wherein the multimer binds to a surface antigen of the cell, thereby inhibiting infection of the subject by the cell and/or sequestering the cell in the subject (eg, to mark the bound cell for clearance from the systemic circulation or a tissue of the subject). In an alternative, For example, the invention provides a method of treating or preventing (eg, reducing the risk of) a cancer in a human or animal subject (eg, in a human subject), the method comprising administering a multimer of the invention to the subject wherein the multimer binds to a surface antigen of a tumour cell, thereby sequestering the cell in the subject (eg, to mark the bound cell for clearance from the systemic circulation or a tissue of the subject) or marking the cell for targeting by the immune sytem or another therapy (eg, immune checkpoint therapy or CAR-T therapy) administered to the subject.

[0575] In an example, the antigen is selected from CXCR2, CXCR4, GM-CSF, ICAM-1, IFN-g, IL-1, IL-10, IL-12, IL-1R1, IL-1R2, IL-1Ra, IL-1β, IL-4, IL-6, IL-8, MIF, TGF-β, TNF-α, TNFR1, TNFR2 and VCAM-1. Targeting one or more of these antigens may be useful for treating or preventing sepsis in a subject. Thus, in an example the multimer of the invention comprises one or more antigen binding sites (eg, each one provided by a dAb), wherein the multimer is for use in a method of treating or preventing sepsis in a human or animal subject, wherein the multimer is administered to the subject (eg, systemically or intravenously). Optionally, the multimer is monospecific, bispecific, trispecific or tetraspecific for antigen binding. For example, the multimer is bispecific, trispecific or tetraspecific for an antigen selected from CXCR2, CXCR4, GM-CSF, ICAM-1, IFN-g, IL-1, IL-10, IL-12, IL-1R1, IL-1R2, IL-1Ra, IL-1β, IL-4, IL-6, IL-8, MIF, TGF-β, TNF-α, TNFR1, TNFR2 and VCAM-1. There is also provided a pharmaceutical composition comprising such a multimer and a pharmaceutically acceptable diluent, carrier or excipient. There is also provided a method of treating or preventing sepsis in a human or animal subject, the method comprising administering the multimer to the subject, eg, systemically or intravenously.

### Diseases and Conditions

[0576] The polypeptide monomer or multimer (eg, dimer, trimer, tetramer or octamer) of the invention can be used in a method for administration to a human or animal subject to treat or prevent a disease or condition in the subject.

[0577] Optionally, the disease or condition is selected from
[0578] (a) A neurodegenerative disease or condition;
[0579] (b) A brain disease or condition;
[0580] (c) A CNS disease or condition;
[0581] (d) Memory loss or impairment;
[0582] (e) A heart or cardiovascular disease or condition, eg, heart attack, stroke or atrial fibrillation;
[0583] (f) A liver disease or condition;
[0584] (g) A kidney disease or condition, eg, chronic kidney disease (CKD);
[0585] (h) A pancreas disease or condition;
[0586] (i) A lung disease or condition, eg, cystic fibrosis or COPD;
[0587] (j) A gastrointestinal disease or condition;
[0588] (k) A throat or oral cavity disease or condition;
[0589] (1) An ocular disease or condition;
[0590] (m) A genital disease or condition, eg, a vaginal, labial, penile or scrotal disease or condition;
[0591] (n) A sexually-transmissible disease or condition, eg, gonorrhea, HIV infection, syphilis or Chlamydia infection;
[0592] (o) An ear disease or condition;
[0593] (p) A skin disease or condition;
[0594] (q) A heart disease or condition;
[0595] (r) A nasal disease or condition
[0596] (s) A haematological disease or condition, eg, anaemia, eg, anaemia of chronic disease or cancer;
[0597] (t) A viral infection;
[0598] (u) A pathogenic bacterial infection;
[0599] (v) A cancer;
[0600] (w) An autoimmune disease or condition, eg, SLE;
[0601] (x) An inflammatory disease or condition, eg, rheumatoid arthritis, psoriasis, eczema, asthma, ulcerative colitis, colitis, Crohn’s disease or IBD;
[0602] (y) Autism;
[0603] (z) ADHD;
[0604] (aa) Bipolar disorder;
[0605] (bb) ALS [Amyotrophic Lateral Sclerosis];
[0606] (cc) Osteoarthritis;
[0607] (dd) A congenital or development defect or condition;
[0608] (ee) Miscarriage;
[0609] (ff) A blood clotting condition;
[0610] (gg) Bronchitis;
[0611] (hh) Dry or wet AMD;
[0612] (ii) Neovascularisation (eg, of a tumour or in the eye);
[0613] (jj) Common cold;
[0614] (kk) Epilepsy;
[0615] (ll) Fibrosis, eg, liver or lung fibrosis;
[0616] (mm) A fungal disease or condition, eg, thrush;
[0617] (nn) A metabolic disease or condition, eg, obesity, anorexia, diabetes, Type I or Type II diabetes.
[0618] (oo) Ulcer(s), eg, gastric ulceration or skin ulceration;
[0619] (pp) Dry skin;
[0620] (qq) Sjogren’s syndrome;
[0621] (rr) Cytokine storm;
[0622] (ss) Deafness, hearing loss or impairment;
[0623] (tt) Slow or fast metabolism (ie, slower or faster than average for the weight, sex and age of the subject);
[0624] (uu) Conception disorder, eg, infertility or low fertility;
[0625] (vv) Jaundice;
[0626] (ww) Skin rash;
[0627] (xx) Kawasaki Disease;
[0628] (yy) Lyme Disease;
[0629] (zz) An allergy, eg, a nut, grass, pollen, dust mite, cat or dog fur or dander allergy; (aaa) Malaria, typhoid fever, tuberculosis or cholera;
[0630] (bbb) Depression;
[0631] (ccc) Mental retardation;
[0632] (ddd) Microcephaly;
[0633] (eee) Malnutrition;
[0634] (fff) Conjunctivitis;
[0635] (ggg) Pneumonia;
[0636] (hhh) Pulmonary embolism;
[0637] (iii) Pulmonary hypertension;
[0638] (jjj) A bone disorder;
[0639] (kkk) Sepsis or septic shock;
[0640] (lll) Sinusitus;
[0641] (mmm) Stress (eg, occupational stress);
[0642] (nnn) Thalassaemia, anaemia, von Willebrand Disease, or haemophilia;
[0643] (ooo) Shingles or cold sore;
[0644] (ppp) Menstruation;
[0645] (qqq) Low sperm count.

### Neurodegenerative or Cns Diseases or Conditions for Treatment Or Prevention

[0646] In an example, the neurodegenerative or CNS disease or condition is selected from the group consisting of Alzheimer disease, geriopsychosis, Down syndrome, Parkinson’s disease, Creutzfeldt-jakob disease, diabetic neuropathy, Parkinson syndrome, Huntington’s disease, Machado-Joseph disease, amyotrophic lateral sclerosis, diabetic neuropathy, and Creutzfeldt Creutzfeldt- Jakob disease. For example, the disease is Alzheimer disease. For example, the disease is Parkinson syndrome.

[0647] In an example, wherein the method of the invention is practised on a human or animal subject for treating a CNS or neurodegenerative disease or condition, the method causes downregulation of Treg cells in the subject, thereby promoting entry of systemic monocyte-derived macrophages and/or Treg cells across the choroid plexus into the brain of the subject, whereby the disease or condition (eg, Alzheimer’s disease) is treated, prevented or progression thereof is reduced. In an embodiment the method causes an increase of IFN-gamma in the CNS system (eg, in the brain and/or CSF) of the subject. In an example, the method restores nerve fibre and//or reduces the progression of nerve fibre damage. In an example, the method restores nerve myelin and//or reduces the progression of nerve myelin damage. In an example, the method of the invention treats or prevents a disease or condition disclosed in WO2015136541 and/or the method can be used with any method disclosed in WO2015136541 (the disclosure of this document is incorporated by reference herein in its entirety, eg, for providing disclosure of such methods, diseases, conditions and potential therapeutic agents that can be administered to the subject for effecting treatement and/or prevention of CNS and neurodegenerative diseases and conditions, eg, agents such as immune checkpoint inhibitors, eg, anti-PD-1, anti-PD-L1, anti-TIM3 or other antibodies disclosed therein).

### Cancers for Treatment or Prevention

[0648] Cancers that may be treated include tumours that are not vascularized, or not substantially vascularized, as well as vascularized tumours. The cancers may comprise non-solid tumours (such as haematological tumours, for example, leukaemias and lymphomas) or may comprise solid tumours. Types of cancers to be treated with the invention include, but are not limited to, carcinoma, blastoma, and sarcoma, and certain leukaemia or lymphoid malignancies, benign and malignant tumours, and malignancies e.g., sarcomas, carcinomas, and melanomas. Adult tumours/cancers and paediatric tumours/cancers are also included.

[0649] Haematologic cancers are cancers of the blood or bone marrow. Examples of haematological (or haematogenous) cancers include leukaemias, including acute leukaemias (such as acute lymphocytic leukaemia, acute myelocytic leukaemia, acute myelogenous leukaemia and myeloblasts, promyeiocytic, myelomonocytic, monocytic and erythroleukaemia), chronic leukaemias (such as chronic myelocytic (granulocytic) leukaemia, chronic myelogenous leukaemia, and chronic lymphocytic leukaemia), polycythemia vera, lymphoma, Hodgkin’s disease, non-Hodgkin’s lymphoma (indolent and high grade forms), multiple myeloma, Waldenstrom’s macroglobulinemia, heavy chain disease, myelodysplastic syndrome, hairy cell leukaemia and myelodysplasia.

[0650] Solid tumours are abnormal masses of tissue that usually do not contain cysts or liquid areas. Solid tumours can be benign or malignant. Different types of solid tumours are named for the type of cells that form them (such as sarcomas, carcinomas, and lymphomas). Examples of solid tumours, such as sarcomas and carcinomas, include fibrosarcoma, myxosarcoma, liposarcoma, chondrosarcoma, osteosarcoma, and other sarcomas, synovioma, mesothelioma, Ewing’s tumour, leiomyosarcoma, rhabdomyosarcoma, colon carcinoma, lymphoid malignancy, pancreatic cancer, breast cancer, lung cancers, ovarian cancer, prostate cancer, hepatocellular carcinoma, squamous eel! carcinoma, basal cell carcinoma, adenocarcinoma, sweat gland carcinoma, medullary thyroid carcinoma, papillary thyroid carcinoma, pheochromocytomas sebaceous gland carcinoma, papillary carcinoma, papillary adenocarcinomas, medullary carcinoma, bronchogenic carcinoma, renal cell carcinoma, hepatoma, bile duct carcinoma, choriocarcinoma, Wilms’ tumour, cervical cancer, testicular tumour, seminoma, bladder carcinoma, melanoma, and CNS tumours (such as a glioma (such as brainstem glioma and mixed gliomas), glioblastoma (also known as glioblastoma multiforme) astrocytoma, CNS lymphoma, germinoma, medu!loblastoma, Schwannoma craniopharyogioma, ependymoma, pineaioma, hemangioblastoma, acoustic neuroma, oligodendroglioma, menangioma, neuroblastoma, retinoblastoma and brain metastases).

### Autoimmune Diseases for Treatment or Prevention

[0651] Acute Disseminated Encephalomyelitis (ADEM)
[0652] Acute necrotizing hemorrhagic leukoencephalitis
[0653] Addison’s disease
[0654] Agammaglobulinemia
[0655] Alopecia areata
[0656] Amyloidosis
[0657] Ankylosing spondylitis
[0658] Anti-GBM/Anti-TBM nephritis
[0659] Antiphospholipid syndrome (APS)
[0660] Autoimmune angioedema
[0661] Autoimmune aplastic anemia
[0662] Autoimmune dysautonomia
[0663] Autoimmune hepatitis
[0664] Autoimmune hyperlipidemia
[0665] Autoimmune immunodeficiency
[0666] Autoimmune inner ear disease (AIED)
[0667] Autoimmune myocarditis
[0668] Autoimmune oophoritis
[0669] Autoimmune pancreatitis
[0670] Autoimmune retinopathy
[0671] Autoimmune thrombocytopenic purpura (ATP)
[0672] Autoimmune thyroid disease
[0673] Autoimmune urticaria
[0674] Axonal & neuronal neuropathies
[0675] Balo disease
[0676] Behcet’s disease
[0677] Bullous pemphigoid
[0678] Cardiomyopathy
[0679] Castleman disease
[0680] Celiac disease
[0681] Chagas disease
[0682] Chronic fatigue syndrome
[0683] Chronic inflammatory demyelinating polyneuropathy (CIDP)
[0684] Chronic recurrent multifocal ostomyelitis (CRMO)
[0685] Churg-Strauss syndrome
[0686] Cicatricial pemphigoid/benign mucosal pemphigoid
[0687] Crohn’s disease
[0688] Cogans syndrome
[0689] Cold agglutinin disease
[0690] Congenital heart block
[0691] Coxsackie myocarditis
[0692] CREST disease
[0693] Essential mixed cryoglobulinemia
[0694] Demyelinating neuropathies
[0695] Dermatitis herpetiformis
[0696] Dermatomyositis
[0697] Devic’s disease (neuromyelitis optica)
[0698] Discoid lupus
[0699] Dressler’s syndrome
[0700] Endometriosis
[0701] Eosinophilic esophagitis
[0702] Eosinophilic fasciitis
[0703] Erythema nodosum
[0704] Experimental allergic encephalomyelitis
[0705] Evans syndrome
[0706] Fibromyalgia
[0707] Fibrosing alveolitis
[0708] Giant cell arteritis (temporal arteritis)
[0709] Giant cell myocarditis
[0710] Glomerulonephritis
[0711] Goodpasture’s syndrome
[0712] Granulomatosis with Polyangiitis (GPA) (formerly called Wegener’s Granulomatosis)
[0713] Graves’ disease
[0714] Guillain-Barre syndrome
[0715] Hashimoto’s encephalitis
[0716] Hashimoto’s thyroiditis
[0717] Hemolytic anemia
[0718] Henoch-Schonlein purpura
[0719] Herpes gestationis
[0720] Hypogammaglobulinemia
[0721] Idiopathic thrombocytopenic purpura (ITP)
[0722] IgA nephropathy
[0723] IgG4-related sclerosing disease
[0724] Immunoregulatory lipoproteins
[0725] Inclusion body myositis
[0726] Interstitial cystitis
[0727] Juvenile arthritis
[0728] Juvenile diabetes (Type 1 diabetes)
[0729] Juvenile myositis
[0730] Kawasaki syndrome
[0731] Lambert-Eaton syndrome
[0732] Leukocytoclastic vasculitis
[0733] Lichen planus
[0734] Lichen sclerosus
[0735] Ligneous conjunctivitis
[0736] Linear IgA disease (LAD)
[0737] Lupus (SLE)
[0738] Lyme disease, chronic
[0739] Meniere’s disease
[0740] Microscopic polyangiitis
[0741] Mixed connective tissue disease (MCTD)
[0742] Mooren’s ulcer
[0743] Mucha-Habermann disease
[0744] Multiple sclerosis
[0745] Myasthenia gravis
[0746] Myositis
[0747] Narcolepsy
[0748] Neuromyelitis optica (Devic’s)
[0749] Neutropenia
[0750] Ocular cicatricial pemphigoid
[0751] Optic neuritis
[0752] Palindromic rheumatism
[0753] PANDAS (Pediatric Autoimmune Neuropsychiatric Disorders Associated with Streptococcus)
[0754] Paraneoplastic cerebellar degeneration
[0755] Paroxysmal nocturnal hemoglobinuria (PNH)
[0756] Parry Romberg syndrome
[0757] Parsonnage-Turner syndrome
[0758] Pars planitis (peripheral uveitis)
[0759] Pemphigus
[0760] Peripheral neuropathy
[0761] Perivenous encephalomyelitis
[0762] Pernicious anemia
[0763] POEMS syndrome
[0764] Polyarteritis nodosa
[0765] Type I, II, & III autoimmune polyglandular syndromes
[0766] Polymyalgia rheumatica
[0767] Polymyositis
[0768] Postmyocardial infarction syndrome
[0769] Postpericardiotomy syndrome
[0770] Progesterone dermatitis
[0771] Primary biliary cirrhosis
[0772] Primary sclerosing cholangitis
[0773] Psoriasis
[0774] Psoriatic arthritis
[0775] Idiopathic pulmonary fibrosis
[0776] Pyoderma gangrenosum
[0777] Pure red cell aplasia
[0778] Raynauds phenomenon
[0779] Reactive Arthritis
[0780] Reflex sympathetic dystrophy
[0781] Reiter’s syndrome
[0782] Relapsing polychondritis
[0783] Restless legs syndrome
[0784] Retroperitoneal fibrosis
[0785] Rheumatic fever
[0786] Rheumatoid arthritis
[0787] Sarcoidosis
[0788] Schmidt syndrome
[0789] Scleritis
[0790] Scleroderma
[0791] Sjogren’s syndrome
[0792] Sperm & testicular autoimmunity
[0793] Stiff person syndrome
[0794] Subacute bacterial endocarditis (SBE)
[0795] Susac’s syndrome
[0796] Sympathetic ophthalmia
[0797] Takayasu’s arteritis
[0798] Temporal arteritis/Giant cell arteritis
[0799] Thrombocytopenic purpura (TTP)
[0800] Tolosa-Hunt syndrome
[0801] Transverse myelitis
[0802] Type 1 diabetes
[0803] Ulcerative colitis
[0804] Undifferentiated connective tissue disease (UCTD)
[0805] Uveitis
[0806] Vasculitis
[0807] Vesiculobullous dermatosis
[0808] Vitiligo
[0809] Wegener’s granulomatosis (now termed Granulomatosis with Polyangiitis (GPA).

### Inflammatory Diseases for Treatment or Prevention

[0810] Alzheimer’s
[0811] ankylosing spondylitis
[0812] arthritis (osteoarthritis, rheumatoid arthritis (RA), psoriatic arthritis)
[0813] asthma
[0814] atherosclerosis
[0815] Crohn’s disease
[0816] colitis
[0817] dermatitis
[0818] diverticulitis
[0819] fibromyalgia
[0820] hepatitis
[0821] irritable bowel syndrome (IBS)
[0822] systemic lupus erythematous (SLE)
[0823] nephritis
[0824] Parkinson’s disease
[0825] ulcerative colitis.

### Multivalent Soluble TCR

[0826] The present configuration relates to a multivalent soluble TCR protein. In one aspect, the invention relates to tetravalent and octavalent soluble TCR analogues. The TCR proteins of the invention are capable of self-assembly from monomers and are entirely of human origin. The proteins are multimers which comprise an ETO NHR2 multimerisation domain. The invention also relates to methods of constructing multimeric soluble TCRs, and methods of using such proteins.

[0827] Attempts to exploit alternative soluble TCR formats as therapeutic molecules have lagged far behind compared to the plethora of antibody formats. This is largely due to TCR, a heterodimeric transmembrane protein having the intrinsic problem of solubility once the extracellular TCR α/β chains are dissociated from their transmembrane and cytoplasmic domain. Secondly the intrinsic low affinity and avidity of these molecules for their cognate ligand at the target site has to a large degree hampered their development as a therapeutic molecule.

[0828] In order to overcome these drawbacks, the present configuration of the invention provides a TCR protein which is both multivalent and soluble. Multivalency increases the avidity of the TCR for cognate pMHC, and solubility allows the TCR to be used outside of a transmembrane environment. Accordingly, in a first aspect there is provided a multivalent heterodimeric soluble T cell receptor capable of binding pMHC complex comprising:
[0829] (i) TCR extracellular domains;
[0830] (ii) (ii) immunoglobulin constant domains; and
[0831] (iii) (iii) an NHR2 multimerisation domain of ETO.

[0832] The use of Ig constant domains provides the TCR extracellular domains with stability and solubility; multimerisation via the NHR2 domains provides multivalency and increased avidity. Advantageously, all of the domains are of human origin or conform to human protein sequences.

[0833] Using the Ig constant domain to stabilise and render soluble the TCR avoids the use of non-native disulphide bonds. Advantageously, therefore, the TCR of the invention does not comprise a non-native disulphide bond.

[0834] In one embodiment, said complex comprises a heavy chain and a light chain, and each light chain comprises a TCR Vα domain and an immunoglobulin C_{α} domain, and each heavy chain comprises a TCR Vβ domain and an immunoglobulin C_{H}1 domain.

[0835] In one embodiment, each light chain additionally comprises a TCR Cα domain, and each heavy chain additionally comprises a TCR Cβ domain.

[0836] In embodiments, the TCR and immunoglobulin domains can be separated by a flexible linker.

[0837] The NHR2 multimerisation domain is advantageously attached to the C-terminus of an immunoglobulin domain. Thus, each dimer of heavy and light chains will be attached to one multimerisation domain, so that the heavy chain-light chain dimers associate into multivalent oligomers.

[0838] In embodiments, the multimerisation domain and the immunoglobulin domain are separated by a flexible linker. In certain embodiments, this allows the multimerisation domain to multimerise without hindrance from the immunoglobulin domain(s).

[0839] In embodiments, the TCR protein may further comprise an immunoglobulin hinge domain. Hinge domains allow dimerization of heavy chain-light chain dimers; this allows further multimerisation of the TCR proteins. For example, a multimerisation domain which forms polypeptide tetramers can, using an immunoglobulin hinge domain, form multimers up to polypeptide octamers. Likewise, a dimerising multimerisation domain can form tetramers in the presence of a hinge domain.

[0840] In embodiments, the TCR protein of the invention is tetravalent.

[0841] In embodiments, the TCR protein of the invention is octavalent

[0842] The present invention provides a soluble TCR where it is stably assembled in a tetravalent heterodimeric format using the nervy homology region 2 (NHR2) domain found in the ETO family protein in humans (Liu et al. 2006). The NHR2 domain is found naturally to form homotetramer, which is formed from pairing of two NHR2 homodimers. NHR2 linked operably to the extracellular TCRα or TCRβ chain will preferentially form tetravalent heterodimeric soluble TCR protein molecules sequentially self-assembled from a monomer followed by a homodimer (FIG. 1).

[0843] TCR proteins assembling into octamers can be created using the NHR2 domain, by employing immunoglobulin hinge domains.

[0844] In a further aspect, the TCR proteins of the invention can be coupled to biologically active polypeptides/effector molecules. Examples of such polypeptides can include immunologically active moieties such as cytokines, binding proteins such as antibodies or targeted polypeptides, and the like.

[0845] The invention further relates to methods for making tetravalent and octavalent heterodimeric soluble TCR, the DNA vectors encoding the proteins used for transfecting host cells of interests and the use of these novel highly sensitive multivalent soluble TCR protein molecules. Applications for use could include but not limited to, therapeutics, diagnostics and drug discovery.

[0846] In a further aspect, the invention provides a method for constructing multivalent immunoglobulin molecules in an efficient manner, without employing non-human construct components.

[0847] Accordingly, there is provided a multimeric immunoglobulin comprising
[0848] (i) immunoglobulin variable domains; and
[0849] (ii) an NHR2 multimerisation domain of ETO.

[0850] The immunoglobulin variable domains are preferably antibody variable domains. Such domains are fused to the ETO NHR2 multimerisation domain, which provides means for forming tetramers of the immunoglobulin variable domains.

[0851] The ETO NHR2 domain is more efficient than p53 and similar multimerisation domains in the production of immunoglobulin multimers, and permits the production of multimeric immunoglobulin molecules without the use of non-human components in the construct.

[0852] Also provided is a method for producing a multimeric immunoglobulin, comprising expressing immunoglobulin variable domains in fusion with an NHR2 domain of ETO, and allowing the variable domains to assemble into multimers.

[0853] Preferably, the immunoglobulin variable domains are attached to one or more immunoglobulin constant domains.

[0854] Advantageously, the immunoglobulin domains are antibody domains. For example, the variable domains can be V_{H} and V_{L} antibody domains. For example, the constant domains are antibody CH1 domains.

[0855] In one embodiment, the multimeric immunoglobulin molecules according to the invention, both TCR and non-TCR immunoglobulins, are produced for screening by phage display or another display technology. For example, therefore, the multivalent immunoglobulins are produced as fusions with a phage coat protein. For each immunoglobulin produced fused to a coat protein, other immunoglobulin molecules are produced without a coat protein, such that they can assemble on the phage surface as a result of NHR2 multimerisation.

[0856] The present configuration of the invention as detailed above relates to the nucleic acid sequences and methods for producing novel multivalent, for example tetravalent and octavalent, soluble proteins. In one aspect in particular the soluble protein is a TCR assembled into a tetravalent heterodimeric format that can bind four pMHC with high sensitivity, affinity and specificity. The soluble tetravalent heterodimeric TCR is a unique protein molecule composed from either the entire or in part the extracellular TCR α/β chains. The extracellular TCR α/β chains are linked to immunoglobulin C_{H}1 and C_{L} (either C_{K} or Cλ) domains. This linkage allows stable formation of heterodimeric TCR α/β. In the context of soluble tetravalent TCR the unique feature is the NHR2 homotetramer domain of the ETO family of proteins, which is operably linked to the C-terminus of C_{H}1 or the C-terminus of C_{L}. Linkage of the NHR2 domain to the heterodimeric α/βTCR in this manner allows it to self-assemble into a tetravalent format inside cells and be subsequently secreted into the supernatant as a soluble protein.

### TCR Extracellular Domains

[0857] TCR extracellular domains are composed of variable and constant regions. These domains are present in T-cell receptors in the same way as they are present in antibodies and other immunoglobulin domains. The TCR repertoire has extensive diversity created by the same gene rearrangement mechanisms used in antibody heavy and light chain genes (Tonegawa, S. (1988) Biosci. Rep. 8:3-26). Most of the diversity is generated at the junctions of variable (V) and joining (J) (or diversity, D) regions that encode the complementarity determining region 3 (CDR3) of the α and β chains (Davis and Bjorkman (1988) Nature 334:395-402). Databases of TCR genes are available, such as the IMGT LIGM database, and methods for cloning TCRs are known in the art - for example, see Bentley and Mariuzza (1996) Ann. Rev. Immunol. 14:563-590; Moysey et al., Anal Biochem. 2004 Mar 15;326(2):284-6; Walchli, et al. (2011) A Practical Approach to T-Cell Receptor Cloning and Expression. PLoS ONE 6(11): e27930.

### Immunoglobulin Variable Domains

[0858] Antibody variable domains are known in the art and available from a wide variety of sources. Databases of sequences of antibody variable domains exist, such as IMGT and Kabat, and variable domains can be produced by cloning and expression of natural sequences, or synthesis of artificial nucleic acids according to established techniques.

[0859] Methods for the construction of bacteriophage antibody display libraries and lambda phage expression libraries are well known in the art (McCafferty et al. (1990) Nature, 348: 552; Kang et al. (1991) Proc. Natl. Acad. Sci. USA., 88: 4363; Clackson et al. (1991) Nature, 352: 624; Lowman et al. (1991) Biochemistry, 30: 10832; Burton et al. (1991) Proc. Natl. Acad Sci USA., 88: 10134; Hoogenboom et al. (1991) Nucleic Acids Res., 19: 4133; Chang et al. (1991) J Immunol., 147: 3610; Breitling et al. (1991) Gene, 104: 147; Marks et al. (1991) supra; Barbas et al. (1992) supra; Hawkins and Winter (1992) J Immunol., 22: 867; Marks et al., 1992, J Bioi. Chem., 267: 16007; Lerner et al. (1992) Science, 258: 1313, incorporated herein by reference).

[0860] One particularly advantageous approach has been the use of scFv phage-libraries (Huston et al., 1988, Proc. Natl. Acad. Sci U.S.A., 85: 5879-5883; Chaudhary et al. (1990) Proc. Natl. Acad. Sci U.S.A., 87: 1066-1070; McCafferty et al. (1990) supra; Clackson et al. (1991) Nature, 352: 624; Marks et al. (1991) J Mol. Bioi., 222: 581; Chiswell et al. (1992) Trends Biotech., 10: 80; Marks et al. (1992) J Bioi. Chem., 267). Various embodiments of scFv libraries displayed on bacteriophage coat proteins have been described. Refinements of phage display approaches are also known, for example as described in W096/06213 and W092/01047 (Medical Research Council et al.) and W097/08320 (Morphosys), which are incorporated herein by reference.

[0861] Such techniques can be adapted for the production of multimeric immunoglobulins by the fusion of NHR2 multimerisation domains to the antibody variable domains

### Immunoglobulin Constant Domains

[0862] An immunoglobulin constant domain, as referred to herein, is preferably an antibody constant domain. Constant domains do vary in sequence between antibody subtypes; preferably, the constant domains are IgG constant domains. Preferably, the constant domains are CH1 constant domains. Antibody constant domains are well known in the art and available from a number of sources and databases, including the IMGT and Kabat databases.

[0863] The fusion of antibody constant domains to immunoglobulin variable domains is also known in the art, for example in the construction of engineered Fab antibody fragments.

### Linkers

[0864] Flexible linkers can be used to connect TCR variable domain - Ig constant domain to the NHR2 multimerisation domain. This allows the TCR domains and the multimerisation domain to function without steric hindrance from each other or other molecules in the multimeric complex. Suitable linkers comprise, for example, glycine repeats, glycine-alanine repeats, Gly(4)Ser linkers, or flexible polypeptide linkers as set forth in Reddy Chichili et al., 2012 Protein Science 22:153-167.

### Immunoglobulin Hinge Domain

[0865] The Ig Hinge domain, herein preferably an antibody hinge domain, is the domain which links antibody constant regions in a natural antibody. This domain therefore provides for natural dimerization of molecules which include an antibody constant domain. It is present, for example, in a F(ab)2 antibody fragment, as well as whole antibodies such as IgG. This region comprises two natural interchain disulphide bonds, which connect the two CH1 constant domains together.

[0866] The multimerisation domain, in one embodiment, may be attached to the Ig constant domain or to the hinge domain. If a hinge domain is present, the multimerisation domain will form a TRC octamer, comprising four dimers of TCR variable-Ig Constant domains joined at a hinge region. Without the hinge region, the multimerisation domain will lead to the formation of a tetramer. Preferably, the multimerisation domain is attached to the C-terminal end of the constant domain or the hinge region.

### Biologically Active Molecule

[0867] One or more biologically active molecules or effector molecules (EM) can be attached to the multimer, eg, multimeric TCR proteins, of the present invention. Such molecules may be, for example, antibodies, especially antibodies which may assist in immune recognition and functioning of the TCR, such as anti-CD3 antibodies or antibody fragments.

[0868] In some aspects, the biologically active molecule can be a cytotoxic drug, toxin or a biologically active molecule such as a cytokine, as described in more detail below. Examples of biologically active molecules include chemokines such as MIP-1b, cytokines such as IL-2, growth factors such as GM-CSF or G-CSF, toxins such as ricin, cytotoxic agents, such as doxorubicin or taxanes, labels including radioactive and fluorescent labels, and the like. For examples of biologically active molecules conjugatable to TCRs, see US20110071919.

[0869] In other aspects, the biologically active molecule is, for example, selected from the group consisting of: a group capable of binding to a molecule which extends the half-life of the polypeptide ligand in vivo, and a molecule which extends the half-life of the polypeptide ligand in vivo. Such a molecule can be, for instance, HSA or a cell matrix protein, and the group capable of binding to a molecule which extends the half-life of the TCR molecule in vivo is an antibody or antibody fragment specific for HSA or a cell matrix protein.

[0870] In one embodiment, the biologically active molecule is a binding molecule, for example an antibody fragment. 2, 3, 4, 5 or more antibody fragments may be joined together using suitable linkers. The specificities of any two or more of these antibody fragments may be the same or different; if they are the same, a multivalent binding structure will be formed, which has increased avidity for the target compared to univalent antibody fragments.

[0871] The biologically active molecule can moreover be an effector group, for example an antibody Fc region.

[0872] Attachments to the N or C terminus may be made prior to assembly of the TCR molecule or engineered polypeptide into multimers, or afterwards. Thus, the TCR fusion with an Ig Constant domain may be produced (synthetically, or by expression of nucleic acid) with an N or C terminal biologically active molecule already in place. In certain aspects, however, the addition to the N or C terminus takes place after the TCR fusion has been produced. For example, Fluorenylmethyloxycarbonyl chloride can be used to introduce the Fmoc protective group at the N-terminus of the TCR fusion. Fmoc binds to serum albumins including HSA with high affinity, and Fmoc-Trp or FMOC-Lys bind with an increased affinity. The peptide can be synthesised with the Fmoc protecting group left on, and then coupled with the scaffold through the cysteines. An alternative is the palmitoyl moiety which also binds HSA and has, for example been used in Liraglutide to extend the half-life of this GLP-1 analogue.

[0873] Alternatively, the TCR fusinon can be modified at the N-terminus, for example with the amine- and sulfhydryl-reactive linker N-e-maleimidocaproyloxy)succinimide ester (EMCS). Via this linker the TCR can be linked to other polypeptides, for example an antibody Fc fragment.

### The NHR2 Domain

[0874] AML1/ETO is the fusion protein resulting from the t(8;21) found in acute myeloid leukemia (AML) of the M2 subtype. AML1/ETO contains the N-terminal 177 amino acids of RUNX1 fused in frame with most (575 aa) of ETO. The nervy homology domain 2 of ETO is responsible for many of the biological activities associated with AML1/ETO, including oligomerisation and protein-protein interactions. This domain is characterised in detail in Liu et al (2006). See Genbank accession number NG_023272.2.

[0875] In one aspect of the present invention, the protein assembled into a soluble multivalent format is a TCR composed of either in part or all of the extracellular domains of the TCR α and β chains. The TCR α and β chains are stabilized by immunoglobulin C_{H}1 and C_{L} domains and could be arranged in the following configurations:
[0876] 1. Vα-C_{L} and VβC_{H}1
[0877] 2. Vα-C_{H}1 and Vβ-C_{L}
[0878] 3. VαCα-C_{L} and VβCβ-C_{H}1
[0879] 4. VαCαC_{H}1 and VβCβC_{L}

[0880] In one aspect of this invention, the extracellular TCR domains are linked to immunoglobulin C_{H}1 and C_{L} domains via an optional peptide linker (L) to promote protein flexibility and facilitate optimal protein folding.
[0881] 1. Vα-(L)-C_{L} and Vβ-(L)-C_{H}1
[0882] 2. Vα-(L)-C_{H}1 and Vβ-(L)-C_{L}
[0883] 3. VαCα-(L)-C_{L} and VβCβ-(L)-C_{H}1
[0884] 4. VαCα-(L)-C_{H}1 and VβCβ-(L)-C_{L}

[0885] In another aspect of this invention, a tetramerisation domain (TD) such as NHR2 homotetramer domain is linked to the C-terminus of either the immunoglobulin C_{H}1 or C_{L} domain, which is linked to the extracellular TCR α and β chain. The NHR2 domain could be optionally linked to C_{H}1 or C_{L} domain via a peptide linker. The resulting tetravalent heterodimeric TCR protein could be arranged in the following configurations where (L) is an optional peptide linker:
[0886] 1. Vα-(L)-C_{L} and Vβ-(L)-C_{H}1-(L)-TD
[0887] 2. Vα-(L)-C_{H}1 -(L)-TD and Vβ-(L)-C_{L}
[0888] 3. VαCα-(L)-C_{L} and VβCβ-(L)-C_{H}1-(L)-TD
[0889] 4. VαCα-(L)-C_{H}1-(L)-TD and VβCβ-(L)-C_{L}
[0890] 5. Vα-(L)-C_{L}-(L)-TD and Vβ-(L)-C_{H}1
[0891] 6. Vα-(L)-C_{H}1 and Vβ-(L)-C_{L}-(L)-TD
[0892] 7. VαCα-(L)-C_{L}-(L)-TD and VβCβ-(L)-C_{H}1
[0893] 8. VαCα-(L)-C_{H}1and VβCβ-(L)-C_{L}-(L)-TD

[0894] The sensitivity of the soluble TCR for its cognate pMHC can be enhanced by increasing the avidity effect. This is achieved by increasing the number of antigen binding sites, facilitated by the tetramerisation domain. This in turn also increases the molecular weight of the protein molecule compared to a monovalent soluble TCR and thus extends serum retention in circulation. Increasing the serum half-life also enhances the likelihood of these molecules interacting with their cognate target antigens.

[0895] The tetravalent heterodimeric soluble TCR protein molecule is capable of binding simultaneously to one, two, three or four pMHC displayed on a single cell or bind simultaneously to one, two, three or four different cells displaying its cognate pMHC.

[0896] TCR α and β chain sequences used in this invention could be from a known TCR specific for a particular pMHC or identified de novo by screening using techniques known in the art, such as phage display. Furthermore, TCR sequences are not limited to α and β chain in this invention but can also incorporate TCRδ and γ or ε chain and sequence variations thereof either directly cloned from human T cells or identified by directed evolution using recombinant DNA technology.

[0897] In another aspect to this invention, the tetravalent heterodimeric soluble TCR protein molecules are preferentially produced in mammalian cells for optimal production of soluble, stable and correctly folded protein molecules.

[0898] Multimer (eg, tetramer or octamer), or multivalent TCR according to the present invention may be expressed in cells, such as mammalian cells, using any suitable vector system. The pTT5 expression vector is one example of an expression system is used to express multivalent soluble TCR. The pTT5 expression system allows for high-level transient production of recombinant proteins in suspension-adapted HEK293 EBNA cells (Zhang et al. 2009). It contains origin of replication (oriP) that is recognized by the viral protein Epstein-Barr Nuclear Antigen 1 (EBNA-1), which together with the host cell replication factor mediates episomal replication of the DNA plasmid allowing enhanced expression of recombinant protein. Other suitable vector system for mammalian cell expression known in the art and commercially available can be used with this invention.

[0899] The tetravalent heterodimeric soluble TCR protein molecules or other multimers can be produced by transiently expressing genes from an expression vector.

[0900] In another embodiment, tetravalent heterodimeric soluble TCR protein molecules or other multimers can be produced from an engineered stable cell line. Cell lines can be engineered to produce the protein molecule using genome-engineering techniques known in the art where the gene(s) encoding for the protein molecule is integrated into the genome of the host cells either as a single copy or multiple copies. The site of DNA integration can be a defined location within the host genome or randomly integrated to yield maximum expression of the desired protein molecule. Genome engineering techniques could include but not limited to, homologous recombination, transposon mediated gene transfer such as PiggyBac transposon system, site specific recombinases including recombinase-mediated cassette exchange, endonuclease mediated gene targeting such as CRISPR/Cas9, TALENs, Zinc-finger nuclease, meganuclease and virus mediated gene transfer such as Lentivirus.

[0901] Also, in another aspect to the invention, the tetravalent heterodimeric soluble TCR protein molecule or other multimer is produced by overexpression in the cytoplasm of E. coli as inclusion bodies and refolded in vitro after purification by affinity chromatography to produce functional protein molecules capable of correctly binding to its cognate pMHC or antigen.

[0902] In another aspect to the invention, expression of the tetravalent heterodimeric soluble TCR protein molecule or other multimer is not limited to mammalian or bacterial cells but can also be expressed and produced in insect cells, plant cells and lower eukaryotic cells such as yeast cells.

[0903] In another aspect to this invention, the heterodimeric soluble TCR molecule or other multimer is produced as an octavalent protein complex, eg, having up to eight binding sites for its cognate pMHC (FIG. 2). The multiple antigen binding sites allow this molecule to bind up to eight pMHC displayed on one cell or bind pMHC displayed on up to eight different cells thus creating a highly sensitive soluble TCR.

[0904] The heterodimeric soluble TCR portion of the molecule is made into a bivalent molecule by fusing the immunoglobulin hinge domain to the C-terminus of either the C_{H}1 or C_{L} domain, which is linked itself either to TCR α or β chain. The hinge domain allows for the connection of two heavy chains giving a structure similar to IgG. To the C-terminus of the hinge domain, a tetramerisation domain such as NHR2 is linked via an optional peptide linker. By joining immunoglobulin hinge to C- and N-terminus of Ig CH1 or CL domain and NHR2 domain respectively, it allows for the assembly of two NHR2 monomers referred to as monomer². In this conformation we predict the two NHR2 domains will most likely not form a homodimer by an antiparallel association due to structural constraints unless a long flexible linker is provided between the hinge and NHR2 domain. Linkage of the tetramerisation and the hinge domain to the to the heterodimeric soluble TCR via immunoglobulin C_{H}1 or C_{L} domain allows for the stepwise self-assembly of an octavalent soluble TCR formed through a NHR2 homotetramer². The self-assembly of the octavalent soluble TCR is via NHR2 monomer² and homodimer² intermediate protein complexes (FIG. 2). The resulting octavalent heterodimeric soluble TCR protein molecule will have superior sensitivity for its cognate pMHC thus giving it a distinctive advantage of identifying unknown antigen or pMHC without having to affinity mature the TCR for its pMHC ligand much beyond affinities seen naturally. In particular it would be useful for identifying pMHC recognized by uncharacterized tumour-specific T cells and T cells involved in other diseases such as autoimmune diseases. A number of different configurations of the octavalent heterodimeric soluble TCR protein molecules can be produced. Some examples are shown below.
[0905] 1. Vα-(L)-C_{L} and Vβ-(L)-C_{H}1-Hinge-(L)-TD
[0906] 2. Vα-(L)-C_{H}1-Hinge-(L)-TD and Vβ-(L)-C_{L}
[0907] 3. Vα-Cα-(L)-C_{L} and Vβ-Cβ-(L)-C_{H}1-Hinge-(L)-TD
[0908] 4. VαCα(L)-C_{H}1-Hinge-(L)-TD and VβCβ-(L)-C_{L}
[0909] 5. Vα-(L)-C_{L}-(L)-TD and Vβ-(L)-C_{H}1-Hinge
[0910] 6. Vα-(L)-C_{H}1-Hinge and Vβ-(L)-C_{L}-(L)-TD
[0911] 7. Vα-Cα-(L)-C_{L}-(L)-TD and Vβ-Cβ(L)-C_{H}1-Hinge
[0912] 8. Vα-Cα-(L)-C_{H}1-Hinge and Vβ-Cβ-(L)-C_{L}-(L)-TD

[0913] In another aspect to this invention, the self-assembled multivalent protein preferentially tetravalent and octavalent heterodimeric soluble TCR are fused or conjugated to biologically active agent/effector molecule thus allowing these molecules to be guided to the desired cell population such as cancers cells and exert their therapeutic effect specifically. The tumour targeting ability of monoclonal antibodies to guide an effector molecule such as a cytotoxic drug, toxins or a biologically active molecule such as cytokines is well established (Perez et al. 2014; Young et al. 2014). In a similar manner the multivalent soluble TCR molecules outlined in this invention can also be fused with effector proteins and polypeptide or conjugated to cytotoxic agents. Examples of effector protein molecules suitable for use as a fusion protein with the multivalent protein complexes outlined in this invention include but are not limited to, IFNα, IFNβ, IFNγ, IL-2, IL-11, IL-13, granulocyte colony-stimulating factor [G-CSF], granulocyte-macrophage colony-stimulating factor [GM-CSF], and tumor necrosis factor [TNF]α, IL-7, IL-10, IL-12, IL-15, IL-21, CD40L, and TRAIL, the costimulatory ligand is B7.1 or B7.2, the chemokines DC-CK1, SDF-1, fractalkine, lyphotactin, IP-10, Mig, MCAF, M1P-1α, MIP-⅓, IL-8, NAP-2, PF-4, and RANTES or an active fragment thereof. Examples of toxic agent suitable for use as a fusion protein or conjugated to the multivalent protein complexes described in this invention include but not limited to, toxins such as diphtheria toxin, ricin, Pseudomonas exotoxin, cytotoxic drugs such as auristatin, maytansines, calicheamicin, anthracyclines, duocarmycins, pyrrolobenzodiazepines. The cytotoxic drug can be conjugated by a select linker, which is either non-cleavable or cleavable by protease or is acid-labile.

[0914] To eliminate heterogeneity and improve conjugate stability the cytotoxic drug can be conjugated in a site-specific manner. By engineering specific cysteine residues or using enzymatic conjugation through glycotransferases and transglutaminases can achieve this (Panowski et al. 2014).

[0915] In another aspect of the invention, the multivalent protein complex is covalently linked to molecules allowing detection, such as fluorescent, radioactive or electron transfer agents.

[0916] In another aspect of the invention, an effector molecule (EM) is fused to the multivalent protein complex via the C-terminus of the tetramerisation domain such as NHR2 via an optional peptide linker. Fusion via the NHR2 domain can be arranged to produce multivalent protein complexes in a number of different configurations. Examples of some of the protein configurations that can be produced using the tetravalent heterodimeric soluble TCR is shown below:
[0917] 1. Vα-(L)-C_{L} and Vβ-(L)-C_{H}1-(L)-TD-(L)-EM
[0918] 2. Vα-(L)-C_{H}1-(L)-TD-(L)-EM and Vβ-(L)-C_{L}
[0919] 3. Vα-Cα-(L)-C_{L} and Vβ-Cβ-(L)-C_{H}1-(L)-TD-(L)-EM
[0920] 4. Vα-Cα-(L)-C_{H}1-(L)-TD-(L)-EM and Vβ-Cβ-(L)-C_{L}
[0921] 5. Vα- (L)-C_{L}-(L)-TD-(L)-EM and Vβ-(L)-C_{H}1
[0922] 6. Vα-(L)-C_{H}1 and Vβ-(L)-C_{L}-(L)-TD-(L)-EM
[0923] 7. Vα-Cα-(L)-C_{L}-(L)-TD-(L)-EM and Vβ-Cβ-(L)-C_{H}1
[0924] 8. Vα-Cα-(L)-C_{H}1 and Vβ-Cβ-(L)-C_{L}-(L)-TD-(L)-EM

[0925] In another aspect of the invention, the effector molecule (EM) is fused to the multivalent protein complex at the C-terminus of either the immunoglobulin CH1 or CL1 domain via an optional peptide linker. Fusion of the EM via the immunoglobulin domain can be arranged to produce multivalent protein complexes in a number of different configurations. Examples of some of the protein configurations that can be produced using the tetravalent heterodimeric soluble TCR is shown below:
[0926] 9. Vα-(L)-C_{L}-(L)-EM and Vβ-(L)-C_{H}1-(L)-TD
[0927] 10. Vα-(L)-C_{H}1-(L)-TD and Vβ-(L)-C_{L}-(L)-EM
[0928] 11. Vα-Cα-(L)-C_{L}-(L)-EM and Vαβ-Cβ-(L)-C_{H}1-(L)-TD
[0929] 12. Vα-Cα-(L)-C_{H}1-(L)-TD and Vβ-Cβ-(L)-C_{L}-(L)-EM
[0930] 13. Vα-(L)-C_{L}-(L)-TD and Vβ-(L)-C_{H}1-(L)-EM
[0931] 14. Vα-(L)-C_{H}1-(L)-EM and Vβ-(L)-C_{L}-(L)-TD
[0932] 15. Vα-Cα-(L)-C_{L}-(L)-TD and Vβ-Cβ-(L)-C_{H}1-(L)-EM
[0933] 16. Vα-Cα-(L)-C_{H}1-(L)-EM and Vβ-Cβ-(L)-C_{L}-(L)-TD

[0934] In another aspect of the invention, effector molecules (EM) are fused to the multivalent protein complex at the C-terminus of either the immunoglobulin CH1 or CL1 domain and also the C-terminus of the tetramerisation domain (e.g. NHR2) via an optional peptide linkers. This approach allows for the fusion of two effector molecules to be fused per TCR heterodimer complex. Fusion of the EM via the immunoglobulin domain and the tetramerisation domain can be arranged to produce multivalent protein complexes in a number of different configurations. Examples of some of the protein configurations that can be produced using the tetravalent heterodimeric soluble TCR is shown below:
[0935] 17. Vα-(L)-C_{L}-(L)-EM and Vβ-(L)-C_{H}1-(L)-TD-(L)-EM
[0936] 18. Vα-(L)-C_{H}1-(L)-TD-(L)-EM and Vβ-(L)-C_{L}-(L)-EM
[0937] 19. Vα-Cα-(L)-C_{L}-(L)-EM and VβCβ-(L)-C_{H}1-(L)-TD-(L)-EM
[0938] 20. Vα-Cα-(L)-C_{H}1-(L)-TD-(L)-EM and Vβ-Cβ-(L)-C_{L}-(L)-EM
[0939] 21. Vα-(L)-C_{L}-(L)-TD-(L)-EM and Vβ-(L)-C_{H}1-(L)-EM
[0940] 22. Vα-(L)-C_{H}1-(L)-EM and Vβ-(L)-C_{L}-(L-)TD-(L)-EM
[0941] 23. Vα-Cα-(L)-C_{L}-(L)-TD-(L)-EM and Vβ-Cβ-(L)-C_{H}1-(L)-EM
[0942] 24. Vα-(L)-C_{H}1-(L)-EM and Vβ-Cβ-(L)-C_{L}-(L)-TD-(L)-EM

[0943] In another aspect of the invention, the multivalent protein complex is fused to a protein tag to facilitate purification. Purification tags are known in the art and they include, without being limited to, the following tags: His, GST, TEV, MBP, Strep, FLAG.

### Non-TCR Multimers

[0944] The present invention provides a unique method for assembling proteins in a soluble multivalent format with potential to bind multiple interacting domains or antigens. The protein can be a monomer, homodimer, heterodimer or oligomer preferentially involved either directly or indirectly in the immune system, or having the potential to regulate immune responses. Examples include, but not limited to, TCR, peptide MHC class I and class II, antibodies or antigen-binding portions thereof and binding proteins having alternative non-antibody protein scaffolds.

[0945] In another aspect of the invention, the interacting domains or antigens could be any cell surface expressed or secreted proteins, peptide-associated with MHC Class I or II or any proteins associated with pathogens including viral and bacterial proteins.

[0946] Non-TCR multimers may be multimers of antibodies or antibody fragments, such as dAbs of Fabs. Examples of dAbs and Fabs in accordance with the invention include the following:

[0947] Examples of multivalent dAbs
[0948] 25. VH-(L)-NHR2
[0949] 26. VL(λ or κ)-(L)-NHR2
[0950] 27. VH-(L)-NHR2-(L)-EM
[0951] 28. VL(λ or κ)-(L)-NHR2-(L)-EM
[0952] 29. VH-CH1-(L)-NHR2
[0953] 30. VL(λ or κ)-CL-(L)-NHR2
[0954] 31. VH-CH1-(L)-NHR2-(L)-EM
[0955] 32. VL(λ or κ)-CL-(L)-NHR2-(L)-EM

[0956] Examples of multivalent Fabs
[0957] 33. VH-CH1-(L)-NHR2 and VL(λ or κ)-CL
[0958] 34. VL(λ or κ)-CL-(L)-NHR2 and VH-CH1
[0959] 35. VH-CH1-Hinge-(L)-NHR2 and VL(λ or κ)-CL
[0960] 36. VL(λ or κ)-CL-Hinge-(L)-NHR2 and VH-CH1
[0961] 37. VH-CH1-(L)-NHR2-(L)-EM and VL(λ or κ)-CL
[0962] 38. VL(λ or κ)-CL-(L)-NHR2-(L)-EM and VH-CH1
[0963] 39. VH-CH1-Hinge-(L)-NHR2-(L)-EM and VL(λ or κ)-CL
[0964] 40. VL(λ or κ)-CL-Hinge-(L)-NHR2-(L)-EM and VH-CH1
[0965] 41. VH-CH1-(L)-NHR2 and VL(λ or κ)-CL-(L)-EM
[0966] 42. VL(λ or κ)-CL-(L)-NHR2 and VH-CH1-(L)-EM
[0967] 43. VH-CH1-Hinge-(L)-NHR2 and VL(λ or κ)-CL-(L)-EM 44. VL(λ or κ)-CL-Hinge-(L)-NHR2 and VH-CH1-(L)-EM

[0968] In the examples above, (L) denotes an optional peptide linker, whilst EM denotes a biologically active agent or effector molecule such as toxins, drugs or cytokines, and including binding molecules such as antibodies, Fabs and ScFv.

[0969] The variable light chain can be either Vλ or Vκ.

[0970] In one aspect of the invention, the assembled tetramerized protein molecule in one example could be a human pMHC for the application in drug discovery using animal drug discovery platforms (e.g. mice, rats, rabbits, chicken). In such a context, the tetramerisation domain is preferentially expressed and produced from genes originating from the animal species it is intended for. One example of such drug discovery applications would be the use of the tetramerized human pMHC as an antigen for immunization in rats for example. Once rats are immunized with pMHC the immune response is directed specifically towards the human pMHC and not the tetramerisation domain of the protein complex.

[0971] Multivalent antibodies can be produced, for example using single domain antibody sequences, fused to the NHR2 multimerisation domain.

[0972] In a related aspect to the invention, the tetravalent protein can be a peptide used as a probe for molecular imaging of tumour antigens. The multivalent binding of such a probe will have distinctive advantage over monovalent molecular probes as it will have enhanced affinity, avidity and retention time in vivo and this in turn will enhance in vivo tumour targeting.

[0973] The multimerisation domain is the NHR2 domain set forth above. Preferably, polypeptides are stabilized and/or rendered soluble by the use of Ig constant domains fused to the polypeptides, such that the fusions provide tetramers of polypeptides. Ig hinge domains can be used to provide octamers.

### Uses of Multimers

[0974] Multimeric TCR proteins according to the invention are useful in any application in which soluble TCR proteins are indicated. Particular advantages of the TCR proteins of the invention include increased avidity for the selected target, and/or the ability to bind a plurality of targets.

[0975] Thus, in one aspect, the multivalent heterodimeric soluble TCR protein molecules of the invention can be used for selectively inhibiting immune responses, for example suppression of an autoimmune response. The multivalent, for example tetravalent, nature of these soluble protein molecules gives it exquisite sensitivity and binding affinity to compete antigen-specific interactions between T cells and antigen presenting cells. This kind of neutralization effect can be therapeutically beneficial in autoimmune diseases such as rheumatoid arthritis, systemic lupus erythematosus, psoriasis, inflammatory bowel diseases, graves disease, vasculitis and type 1 diabetes.

[0976] Similarly, the tetravalent heterodimeric soluble TCR protein molecules can be used to prevent tissue transplant rejection by selectively suppressing T cell recognition of specific transplantation antigen and self antigens binding to target molecule and thus inhibiting cell-to-cell interaction.

[0977] In another aspect of the invention, the tetravalent heterodimeric soluble TCR protein molecules can be used in clinical studies such as toxicity, infectious disease studies, neurological studies, behavior and cognition studies, reproduction, genetics and xenotransplantation studies.

[0978] The tetravalent heterodimeric soluble TCR protein molecules with enhanced sensitivity for cognate pMHC can be used for the purpose of diagnostics using biological samples obtained directly from human patients. The enhanced sensitivity of the tetravalent heterodimeric soluble TCRs allows detection of potential disease-associated peptides displayed on MHC, which are naturally found to be expressed at low density. These molecules can also be used for patient stratification for enrolling patient onto relevant clinical trials.

[0979] In another aspect of the invention, octavalent heterodimeric soluble TCR protein molecules can be used in pharmaceutical preparations for the treatment of various diseases.

[0980] In another related aspect to this invention, octavalent heterodimeric soluble TCR protein molecules can be used as a probe for tumour molecular imaging or prepared as a therapeutic protein.

[0981] Optionally, the polypeptide (first polypeptide) comprises or consists of a polypeptide disclosed in Table 8. In an example the invention provides a multimer (eg, a dimer, trimer or tetramer, preferably a tetramer) of such a polypeptide. In an example, in Table 8, the multimerization domain (SAM) is a p53 domain (eg, a human p53 domain). In an example, in Table 8, the multimerization domain (SAM) is an orthologue or homologue of a p53 domain (eg, a human p53 domain).

[0982] Optionally, the invention provides a polypeptide (eg, said polypeptide or said first polypeptide), wherein the polypeptide comprises or consists of (in N- to C-terminal direction*);
[0983] A. A dAb and a self-associating multimersiation domain (SAM)
[0984] B. A first dAb, a SAM and a second dAb
[0985] C. A first scFv and a SAM;
[0986] D. A first scFv, a SAM and a second scFv;
[0987] E. A first scFv, a SAM and a first dAb;
[0988] F. A first dAb, a CH2, a CH3 and a SAM;
[0989] G. A first scFv, a CH2, a CH3 and a SAM;
[0990] H. A VH, a CH1, a CH2 a CH3 and a SAM;
[0991] I. A VL, a CL, a CH2, a CH3 and a SAM;
[0992] J. A dAb; a SAM, a CH2 and a CH3;
[0993] K. A scFv; a SAM, a CH2 and a CH3;
[0994] L. A VH, a CH1, a SAM, a CH2 and a CH3;
[0995] M. A VL, a CL, a SAM, a CH2 and a CH3;
[0996] N. A first dAb, a second dAb and a SAM;
[0997] O. A VH, a CH1 and a SAM;
[0998] P. A VL, a CL and a SAM;
[0999] Q. A VH, a CH1, a SAM and a first dAb;
[1000] R. A VL, a CL, a SAM and a first dAb;
[1001] S. A first dAb, a second dAb, a SAM and a third dAb;
[1002] T. A first dAb, a second dAb, a SAM and a first scFv;
[1003] U. A first dAb, a second dAb, a SAM, a third dAb and a fourth dAb;
[1004] V. A first dAb, a CH2, a CH3, a SAM and a second dAb;
[1005] W. A first dAb, a CH2, a CH3, a SAM and a first scFv;
[1006] X. A first dAb, a second dAb, a CH2, a CH3 and a SAM;
[1007] Y. A first dAb, a second dAb, a CH2, a CH3, a SAM and a third dAb;
[1008] Z. A first dAb, a second dAb, a CH2, a CH3, a SAM and a first scFv; or
[1009] AA. A first dAb, a second dAb, a CH2, a CH3, a SAM, a third dAb and a fourth dAb.

[1010] *In an alternative the components are written in the C- to N-terminal direction.

[1011] In an embodiment, polypeptide H, L, O or Q is associated with a second polypeptide, wherein the second polypeptide comprises (in N- to C-terminal direction) VL and CL, wherein the CL is associated with the CH1 of the first polypeptide.

[1012] In an embodiment, polypeptide I, M, P or R is associated with a second polypeptide, wherein the second polypeptide comprises (in N- to C-terminal direction) VH and CH1, wherein the CH1 is associated with the CL of the first polypeptide.

[1013] In an example, the polypeptide is encoded by a nucleotide sequence disclosed in Table 9. In an example, the polypeptide comprises or consists of an amino acid sequence disclosed in Table 10.

[1014] In an example (i) the polypeptide comprises (in N- to C-terminal direction);
[1015] A. A dAb and a self-associating multimersiation domain (SAM)
[1016] B. A first dAb, a SAM and a second dAb
[1017] C. A first scFv and a SAM;
[1018] D. A first scFv, a SAM and a second scFv;
[1019] E. A first scFv, a SAM and a first dAb;
[1020] F. A first dAb, a CH2, a CH3 and a SAM;
[1021] G. A first scFv, a CH2, a CH3 and a SAM;
[1022] H. A VH, a CH1, a CH2 a CH3 and a SAM;
[1023] I. A VL, a CL, a CH2, a CH3 and a SAM;
[1024] J. A dAb; a SAM, a CH2 and a CH3;
[1025] K. A scFv; a SAM, a CH2 and a CH3;
[1026] L. A VH, a CH1, a SAM, a CH2 and a CH3;
[1027] M. A VL, a CL, a SAM, a CH2 and a CH3;
[1028] N. A first dAb, a second dAb and a SAM;
[1029] O. A VH, a CH1 and a SAM;
[1030] P. A VL, a CL and a SAM;
[1031] Q. A VH, a CH1, a SAM and a first dAb;
[1032] R. A VL, a CL, a SAM and a first dAb;
[1033] S. A first dAb, a second dAb, a SAM and a third dAb;
[1034] T. A first dAb, a second dAb, a SAM and a first scFv;
[1035] U. A first dAb, a second dAb, a SAM, a third dAb and a fourth dAb;
[1036] V. A first dAb, a CH2, a CH3, a SAM and a second dAb;
[1037] W. A first dAb, a CH2, a CH3, a SAM and a first scFv;
[1038] X. A first dAb, a second dAb, a CH2, a CH3 and a SAM;
[1039] Y. A first dAb, a second dAb, a CH2, a CH3, a SAM and a third dAb;
[1040] Z. A first dAb, a second dAb, a CH2, a CH3, a SAM and a first scFv; or
[1041] AA. A first dAb, a second dAb, a CH2, a CH3, a SAM, a third dAb and a fourth dAb.
Or (ii) the polypeptide comprises (in C- to N-terminal direction);
[1042] A. A dAb and a self-associating multimersiation domain (SAM)
[1043] B. A first dAb, a SAM and a second dAb
[1044] C. A first scFv and a SAM;
[1045] D. A first scFv, a SAM and a second scFv;
[1046] E. A first scFv, a SAM and a first dAb;
[1047] F. A first dAb, a CH2, a CH3 and a SAM;
[1048] G. A first scFv, a CH2, a CH3 and a SAM;
[1049] H. A VH, a CH1, a CH2 a CH3 and a SAM;
[1050] I. A VL, a CL, a CH2, a CH3 and a SAM;
[1051] J. A dAb; a SAM, a CH2 and a CH3;
[1052] K. A scFv; a SAM, a CH2 and a CH3;
[1053] L. A VH, a CH1, a SAM, a CH2 and a CH3;
[1054] M. A VL, a CL, a SAM, a CH2 and a CH3;
[1055] N. A first dAb, a second dAb and a SAM;
[1056] O. A VH, a CH1 and a SAM;
[1057] P. A VL, a CL and a SAM;
[1058] Q. A VH, a CH1, a SAM and a first dAb;
[1059] R. A VL, a CL, a SAM and a first dAb;
[1060] S. A first dAb, a second dAb, a SAM and a third dAb;
[1061] T. A first dAb, a second dAb, a SAM and a first scFv;
[1062] U. A first dAb, a second dAb, a SAM, a third dAb and a fourth dAb;
[1063] V. A first dAb, a CH2, a CH3, a SAM and a second dAb;
[1064] W. A first dAb, a CH2, a CH3, a SAM and a first scFv;
[1065] X. A first dAb, a second dAb, a CH2, a CH3 and a SAM;
[1066] Y. A first dAb, a second dAb, a CH2, a CH3, a SAM and a third dAb;
[1067] Z. A first dAb, a second dAb, a CH2, a CH3, a SAM and a first scFv; or
[1068] AA. A first dAb, a second dAb, a CH2, a CH3, a SAM, a third dAb and a fourth dAb.

[1069] Optionally, the SAM is a tetramerisation domain, eg, a p53 TD.

[1070] In an example the first, second, third (when present) and fourth (when present) dAbs have the same antigen binding specificity. In an example the first, second, third (when present) and fourth (when present) dAbs have the same different binding specificity.

[1071] In an example the first and second scFvs have the same antigen binding specificity. In an example the first and second scFvs have the same different antigen binding specificity.

[1072] In an example the first dAb, second dAb and first scFv have the same antigen binding specificity. In an example the first dAb, second dAb and first scFv have the same different antigen binding specificity.

[1073] Herein, where a dAb is provided in the polypeptide, in an alternative there may be provided instead any different type of antigen binding domain, such as a scFv or Fab or non-Ig binding domain (eg, an affibody, avimer or fibronectin domain).

[1074] Herein, where a scFv is provided in the polypeptide, in an alternative there may be provided instead any different type of antigen binding domain, such as a dAb or Fab or non-Ig binding domain (eg, an affibody, avimer or fibronectin domain).

[1075] Herein, where a Fab is provided in the polypeptide, in an alternative there may be provided instead any different type of antigen binding domain, such as a scFv or dAb or non-Ig binding domain (eg, an affibody, avimer or fibronectin domain).

[1076] Each antigen may be any antigen disclosed herein.

[1077] In an example, the CH1 (when present), CH2 and CH3 are a human Ig CH1, a CH2 a CH3, eg, a IgG1 CH1, CH2 and CH3. In an example, the CH2 comprises a CH2 domain, the CH3 comprises a CH3 domain and the CH2 comprises a hinge amino acid sequence. In this example, the CH2 comprises (in N- to C-terminal direction) the hinge amino acid sequence and the CH2 domain. In an example the hinge amino acid sequence (i) is a complete hinge; (ii) is a hinge amino acid sequence that is non-functional to dimerise the polypeptide with another such polypeptide; (iii) a hinge amino acid sequence devoid of a hinge core comprising the amino acid motif CXXC (and optionally also devoid of an upper hinge amino acid sequence); or (iv) an upper hinge fused to a lower hinge, but devoid of a hinge core comprising the amino acid motif CXXC; or (v) a lower hinge, but devoid of a hinge core comprising the amino acid motif CXXC (and optionally also devoid of an upper hinge amino acid sequence). Examples of upper, core and lower hinge sequences are disclosed in Table 12. In an example, the CH2 is devoid of a functional hinge region, ie, wherein the hinge region is non-functional to dimerise the polypeptide with another such polypeptide. In an example, the CH2 is devoid of a hinge region. In an example, the CH2 is devoid of a complete hinge region sequence. In an example, the CH2 is devoid of a core hinge region sequence.

[1078] In an example, the CH2 comprises (in N- to C- terminal direction) an optional upper hinge region, a lower hinge region and a CH2 domain and wherein the CH2 (and the polypeptide) is devoid of a core hinge region that is functional to dimerise the polypeptide with another said polypeptide.

[1079] In an example, the CH2 comprises in N- to C- terminal direction) an optional upper hinge region, a lower hinge region and a CH2 domain and the wherein the CH2 (and the polypeptide) is devoid of a core hinge region amino acid sequence CXXC, wherein X is any amino acid (optionally wherein each amino acid X is selected from a P, R and S).

[1080] In an example, the CH2 comprises in N- to C- terminal direction) an amino acid selected from SEQ ID NOs: 163-178 and a CH2 domain and the wherein the CH2 (and the polypeptide) is devoid of a core hinge region amino acid sequence CXXC, wherein X is any amino acid (optionally wherein each amino acid X is selected from a P, R and S).

[1081] In an embodiment, the core hinge region amino acid sequence is selected from SEQ ID Nos: 180-182. In an embodiment, the CH2 (an the polyeptide) is devoid of amino acid sequences SEQ ID NOs: 183-187.

[1082] In an embodiment, the CH2 domain is a human IgG1 CH2 domain and the core hinge region amino acid sequence is SEQ ID NO: 180. Optionally, any CH1 and CH3 present in the polypeptide are human IgG1 CH1 and CH3 respectively. Optionally, the CH2 (and the polypeptide) is devoid of a core hinge region amino acid sequence CPPC (SEQ ID NO: 180). Optionally, the CH2 (and the polypeptide) is devoid of upper hinge region amino acid sequence EPKSCDKTHT (SEQ ID NO: 183) and core hinge region amino acid sequence CPPC (SEQ ID NO: 180).

[1083] In an embodiment, the CH2 domain is a human IgG2 CH2 domain and the core hinge region amino acid sequence is SEQ ID NO: 180. Optionally, any CH1 and CH3 present in the polypeptide are human IgG2 CH1 and CH3 respectively. Optionally, the CH2 (and the polypeptide) is devoid of upper hinge region amino acid sequence ERKCCVE (SEQ ID NO: 184) and core hinge region amino acid sequence CPPC (SEQ ID NO: 180).

[1084] In an embodiment, the CH2 domain is a human IgG3 CH2 domain and the core hinge region amino acid sequence is SEQ ID NO: 181. Optionally, any CH1 and CH3 present in the polypeptide are human IgG3 CH1 and CH3 respectively. Optionally, the CH2 (and the polypeptide) is devoid of upper hinge region amino acid sequence ELKTPLGDTTHT (SEQ ID NO: 185) and core hinge region amino acid sequence CPRC (SEQ ID NO: 181). Optionally, alternatively the CH2 (and the polypeptide) is devoid of upper hinge region amino acid sequence EPKSCDTPPP (SEQ ID NO: 186) and core hinge region amino acid sequence CPRC (SEQ ID NO: 181).

[1085] In an embodiment, the CH2 domain is a human IgG4 CH2 domain and the core hinge region amino acid sequence is SEQ ID NO: 182. Optionally, any CH1 and CH3 present in the polypeptide are human IgG4 CH1 and CH3 respectively. Optionally, the CH2 (and the polypeptide) is devoid of upper hinge region amino acid sequence ESKYGPP (SEQ ID NO: 187) and core hinge region amino acid sequence CPSC (SEQ ID NO: 182).

[1086] In an example, the CH2 of a polypeptide herein is devoid of a core hinge (and optionally also an upper hinge) amino acid sequence. In an example, the CH2 of a polypeptide herein is devoid of a core hinge CXXC amino acid sequence, wherein X is any amino acid, preferably P, R or S, most preferably P. In an example, the CH2 comprises an APELLGGPSV amino acid sequence, or an PAPELLGGPSV amino acid sequence. In an example, the CH2 comprises an APPVAGPSV amino acid sequence, or an PAPPVAGPSV amino acid sequence. In an example, the CH2 comprises an APEFLGGPSV amino acid sequence, or an PAPEFLGGPSV amino acid sequence.

[1087] In an example, the CH2 and CH3 of a polypeptide herein are human IgG1 CH2 and CH3 domains, wherein the CH2 is devoid of a core hinge (and optionally also an upper hinge) amino acid sequence, eg, wherein the CH2 is devoid of a CPPC sequence. In an example, the CH2 comprises an APELLGGPSV amino acid sequence, or an EPKSCDKTHT[P]APELLGGPSV amino acid sequence, wherein the bracketed P is optional.

[1088] In an example, the CH2 and CH3 of a polypeptide herein are human IgG2 CH2 and CH3 domains, wherein the CH2 is devoid of a core hinge (and optionally also an upper hinge) amino acid sequence, eg, wherein the CH2 is devoid of a CPPC sequence. In an example, the CH2 comprises an APPVAGPSV amino acid sequence, or an ERKCCVE[P]APPVAGPSV amino acid sequence, wherein the bracketed P is optional.

[1089] In an example, the CH2 and CH3 of a polypeptide herein are human IgG3 CH2 and CH3 domains, wherein the CH2 is devoid of a core hinge (and optionally also an upper hinge) amino acid sequence, eg, wherein the CH2 is devoid of a CPRC sequence. In an example, the CH2 comprises an APELLGGPSV amino acid sequence, or an ELKTPLGDTTHT[P]APELLGGPSV amino acid sequence, wherein the bracketed P is optional. In an example, the CH2 comprises an EPKSCDTPPP[P]APELLGGPSV amino acid sequence, wherein the bracketed P is optional.

[1090] In an example, the CH2 and CH3 of a polypeptide herein are human IgG4 CH2 and CH3 domains, wherein the CH2 is devoid of a core hinge (and optionally also an upper hinge) amino acid sequence, eg, wherein the CH2 is devoid of a CPSC sequence. In an example, the CH2 comprises an APEFLGGPSV amino acid sequence, or an ESKYGPP[P]APEFLGGPSV amino acid sequence, wherein the bracketed P is optional.

[1091] When the polypeptide comprises a V-CH1, a CH2 may also be present, but in this case optionally lacking the core hinge region (or at least a sequence selected from CXXC as disclosed herein and SEQ ID Nos: 180-182) and optionally lacking the upper and/or the lower hinge region to prevent F(ab′)2 formation.

### Aspects

[1092] By way of example the invention provides the following Aspects, some of which have been exemplified herein. The following Aspects are not to be interpreted as Claims. The Claims start after the Examples section.

[1093] 1. A polypeptide comprising (in N- to C-terminal direction; or in C- to N-terminal direction)
[1094] (a) An immunoglobulin superfamily domain;
[1095] (b) An optional linker; and
[1096] (c) A self-associating multimerisation domain (SAM) (optionally a self-associating tetramerisation domain (TD)).

[1097] In an example, each linker is a peptide linker comprising (or comprising up to, or consisting of) 40, 30, 25, 20, 19, 18, 17, 16, 15 14, 13, 12, 11, 10, 9, 8, 7, 6, 5, 4 or amino acids.

[1098] In an alternative, the domain of (a) is a non-Ig domain or comprises a non-Ig scaffold.

[1099] In an alternative herein, instead of using a TD or copies of a TD, in an embodiment any other self-associating multimerization domain (SAM) may be used. In an example, the SAM (eg, TD) is a human, dog, cat, horse, monkey (eg, cynomolgus monkey), rodent (eg, mouse or rat), rabbit, bird (eg, chicken) or fish SAM (or TD).

[1100] Optionally, the domain of (a) is capable of specifically binding to an antigen selected from PD-L1, PD-1, 4-1BB, CTLA-4, 4-1BB, CD28, TNF alpha, IL17 (eg, IL17A), CD38, VEGF-A, EGFR, IL-6, IL-4, IL-6R, IL-4R (eg, IL-4Ra), OX40, OX40L, TIM-3, CD20, GITR, VISTA, ICOS, Death Receptor 5 (DR5), LAG-3, CD40, CD40L, CD27, HVEM, KRAS, haemagglutinin, transferrin receptor 1, amyloid beta, BACE1, Tau, TDP43, SOD1, Alpha Synculein and CD3.

[1101] In an example, the antigen is a peptide-MHC.

[1102] In some embodiments (eg, some embodiments of Aspect 16 below or 17 below), the polypeptide comprises at least two binding moieties, eg, two dAbs, two scFvs, or a dAb and a scFv. In an example, these binding moieties bind to the same antigen (eg, an antigen disclosed herein or in the immediately preceding paragraph herein). In another example, the moieties bind to different antigens (eg, an antigen disclosed herein or in the immediately preceding paragraph herein). For example, in Aspect 16B, D, E or F the variable domains or scFvs are capable of specifically binding to the same or different antigens selected from TNF alpha, CD38, IL17a, CD20, PD-1, PD-L1, CTLA-4 and 4-1BB. For example, one of the moieties binds to TNF alpha and the other binds to IL17a; one of the moieties binds to PD-1 and the other binds to 4-1BB; or one of the moieties binds to PD-L1 and the other binds to 4-1BB; one of the moieties binds to PD-1 and the other binds to CTLA-4; or one of the moieties binds to PD-L1 and the other binds to CTLA-4.

[1103] 2. The polypeptide of any preceding Aspect, wherein the domain of (a) is an antibody variable domain.

[1104] For example, a variable domain herein is a VH (eg, comprised by a scFv or a Fab polypeptide chain). In another example, it is a VHH (eg, comprised by a scFv or a Fab polypeptide chain). In another example, it is a humanised VH, humanised VHH or a human VH (eg, comprised by a scFv or a Fab polypeptide chain). In another example, it is a VL (eg, comprised by a scFv or a Fab polypeptide chain). In another example, it is a Vκ. In another example, it is a Vλ.

[1105] In another example, the domain of (a) is a TCR variable domain (eg, a TCRα, TCRβ, TCRγ or TCRδ).

[1106] In an example the immunoglobulin superfamily domain is an antibody single variable domain (dAb).

[1107] 3. The polypeptide of any preceding Aspect, wherein the domain of (a) is selected from an antibody single variable domain, a VH and a VL; or wherein the domain is comprised by an scFv.

[1108] In an example, a single variable domain herein is a human or humanised dAb or nanobody; or is a camelid VHH domain.

[1109] In an example, the domain of (a) is comprised by a single-chain TCR (scTCR).
[1110] 4. The polypeptide of any preceding Aspect, wherein (a) is joined directly to (c); or wherein (b) is joined directly to (a) and (c).
[1111] 5. The polypeptide of any preceding Aspect, comprising (in N- to C-terminal direction) the SAM, (d) an optional second linker and (e) a second immunoglobulin superfamily domain.
[1112] 6. The polypeptide of Aspect 5, wherein the second domain is selected from an antibody single variable domain, a VH and a VL; or wherein the domain is comprised by an scFv.

[1113] In an example, the single variable domain is a human or humanised dAb or nanobody; or is a camelid VHH domain.
[1114] 7. The polypeptide of Aspect 5, wherein the second domain is an antibody single variable domain or an antibody constant domain.
[1115] 8. The polypeptide of Aspect 7, wherein the constant domain is comprised by an antibody Fc region.
[1116] 9. The polypeptide of any one of Aspects 5 to 8, wherein (c) is joined directly to (e); or wherein (d) is joined directly to (c) and (e).
[1117] 10. The polypeptide of any preceding Aspect, wherein the TD is a p53, p63 or p73 TD or a homologue or orthologue thereof; or wherein the TD is a NHR2 TD or a homologue or orthologue thereof.

[1118] Optionally, the TD herein is a TD of a protein disclosed in Table 2.
[1119] 11. The polypeptide of any preceding Aspect, wherein the TD comprises an amino acid sequence that is at least 80% identical to SEQ ID NO: 10 or 126.
[1120] 12. The polypeptide of any preceding Aspect, comprising (f) an antibody variable domain, an antibody constant region or an antibody Fc region between (a) and (c).
[1121] 13. The polypeptide of Aspect 12, wherein (f) comprises (i) an antibody CH1 constant domain; or (ii) an antibody Fc region (ie, comprising a CH2-CH3).
[1122] 14. The polypeptide of Aspect 13, wherein the polypeptide is associated with a second polypeptide, wherein (iii) the second polypeptide comprises an antibody CL constant domain that is paired with the CH1 domain of (i); or (iv) the second polypeptide comprises a second antibody Fc region that is paired with the Fc region of (ii).
[1123] 15. The polypeptide of Aspect 12, wherein the variable domain of (f) is an antibody single variable domain.
[1124] 16. The polypeptide of any preceding Aspect, wherein the polypeptide (first polypeptide) comprises or consists of (in N- to C-terminal direction);
   [1125] A. A first antibody single variable domain (dAb), an optional linker and said SAM;
   [1126] B. A first antibody single variable domain, an optional linker, said SAM and a second antibody single variable domain;
   [1127] C. A first scFv, an optional linker and said SAM;
   [1128] D. A first scFv, an optional linker, said SAM and a second scFv;
   [1129] E. A first antibody single variable domain, an optional linker, said SAM and a first scFv;
   [1130] F. A first scFv, an optional linker, said SAM and a first antibody single variable domain;
   [1131] G. A first antibody variable domain, an optional first linker, a first antibody constant domain, a second optional linker and said SAM;
   [1132] H. Said SAM, an optional linker and a first antibody single variable domain;
   [1133] I. Said SAM, an optional linker and a first scFv;
   [1134] J. Said SAM, an optional linker, a first antibody constant domain, a second optional linker and a first antibody variable domain; or
   [1135] K. Said SAM, an optional linker, a first antibody variable domain, a second optional linker and a first antibody constant domain.

[1136] Optionally, each variable domain is a VH or a VL (eg, a Vκ or a Vλ).

[1137] Optionally, each domain of the polypeptide herein is a human domain. Optionally, each domain of the polypeptide herein is a human or humanised domain.

[1138] 17. The polypeptide of any of Aspects 1 to 15, wherein
[1139] (i) the polypeptide comprises (in N- to C-terminal direction);
   [1140] A. A dAb and a self-associating multimersiation domain (SAM)
   [1141] B. A first dAb, a SAM and a second dAb
   [1142] C. A first scFv and a SAM;
   [1143] D. A first scFv, a SAM and a second scFv;
   [1144] E. A first scFv, a SAM and a first dAb;
   [1145] F. A first dAb, a CH2, a CH3 and a SAM;
   [1146] G. A first scFv, a CH2, a CH3 and a SAM;
   [1147] H. A VH, a CH1, a CH2 a CH3 and a SAM;
   [1148] I. A VL, a CL, a CH2, a CH3 and a SAM;
   [1149] J. A dAb; a SAM, a CH2 and a CH3;
   [1150] K. A scFv; a SAM, a CH2 and a CH3;
   [1151] L. A VH, a CH1, a SAM, a CH2 and a CH3;
   [1152] M. A VL, a CL, a SAM, a CH2 and a CH3;
   [1153] N. A first dAb, a second dAb and a SAM;
   [1154] O. A VH, a CH1 and a SAM;
   [1155] P. A VL, a CL and a SAM;
   [1156] Q. A VH, a CH1, a SAM and a first dAb;
   [1157] R. A VL, a CL, a SAM and a first dAb;
   [1158] S. A first dAb, a second dAb, a SAM and a third dAb;
   [1159] T. A first dAb, a second dAb, a SAM and a first scFv;
   [1160] U. A first dAb, a second dAb, a SAM, a third dAb and a fourth dAb;
   [1161] V. A first dAb, a CH2, a CH3, a SAM and a second dAb;
   [1162] W. A first dAb, a CH2, a CH3, a SAM and a first scFv;
   [1163] X. A first dAb, a second dAb, a CH2, a CH3 and a SAM;
   [1164] Y. A first dAb, a second dAb, a CH2, a CH3, a SAM and a third dAb;
   [1165] Z. A first dAb, a second dAb, a CH2, a CH3, a SAM and a first scFv; or
   [1166] AA. A first dAb, a second dAb, a CH2, a CH3, a SAM, a third dAb and a fourth dAb;
   Or
[1167] (ii) the polypeptide comprises (in C- to N-terminal direction);
   [1168] A. A dAb and a self-associating multimersiation domain (SAM)
   [1169] B. A first dAb, a SAM and a second dAb
   [1170] C. A first scFv and a SAM;
   [1171] D. A first scFv, a SAM and a second scFv;
   [1172] E. A first scFv, a SAM and a first dAb;
   [1173] F. A first dAb, a CH2, a CH3 and a SAM;
   [1174] G. A first scFv, a CH2, a CH3 and a SAM;
   [1175] H. A VH, a CH1, a CH2 a CH3 and a SAM;
   [1176] I. A VL, a CL, a CH2, a CH3 and a SAM;
   [1177] J. A dAb; a SAM, a CH2 and a CH3;
   [1178] K. A scFv; a SAM, a CH2 and a CH3;
   [1179] L. A VH, a CH1, a SAM, a CH2 and a CH3;
   [1180] M. A VL, a CL, a SAM, a CH2 and a CH3;
   [1181] N. A first dAb, a second dAb and a SAM;
   [1182] O. A VH, a CH1 and a SAM;
   [1183] P. A VL, a CL and a SAM;
   [1184] Q. A VH, a CH1, a SAM and a first dAb;
   [1185] R. A VL, a CL, a SAM and a first dAb;
   [1186] S. A first dAb, a second dAb, a SAM and a third dAb;
   [1187] T. A first dAb, a second dAb, a SAM and a first scFv;
   [1188] U. A first dAb, a second dAb, a SAM, a third dAb and a fourth dAb;
   [1189] V. A first dAb, a CH2, a CH3, a SAM and a second dAb;
   [1190] W. A first dAb, a CH2, a CH3, a SAM and a first scFv;
   [1191] X. A first dAb, a second dAb, a CH2, a CH3 and a SAM;
   [1192] Y. A first dAb, a second dAb, a CH2, a CH3, a SAM and a third dAb;
   [1193] Z. A first dAb, a second dAb, a CH2, a CH3, a SAM and a first scFv; or
   [1194] AA. A first dAb, a second dAb, a CH2, a CH3, a SAM, a third dAb and a fourth dAb.

[1195] Thus, in some embodiments the polypeptide comprises an antibody Fc region, wherein the Fc comprises the CH2 and CH3 domains.
[1196] 18. The polypeptide of Aspect 16B, 16D, (i) 17B, (i) 17D, (i) 17N, (i) 17S, (i) 17T, (i) 17U, (i) 17X, (i) 17Y, (i) 17Z, (i) 17AA, (ii) 17B, (ii) 17D, (ii) 17N, (ii) 17S, (ii) 17T, (ii) 17U, (ii) 17X, (ii) 17Y, (ii) 17Z or (ii) 17AA wherein the single variable domains (dAbs) are identical; or wherein the scFvs are identical.
[1197] 19. The polypeptide of Aspect 16B, 16D, (i) 17B, (i) 17D, (i) 17N, (i) 17S, (i) 17T, (i) 17U, (i) 17X, (i) 17Y, (i) 17Z, (i) 17AA, (ii) 17B, (ii) 17D, (ii) 17N, (ii) 17S, (ii) 17T, (ii) 17U, (ii) 17X, (ii) 17Y, (ii) 17Z or (ii) 17AA wherein the single variable domains are different; or wherein the scFvs are different.
[1198] 20. The polypeptide of Aspect 16G, 16J, 16K, (i) 17H, (i) 17I, (i) 17L, (i) 17M, (i) 170, (i) 17P, (i) 17Q, (i) 17R, (ii) 17H, (ii) 17I, (ii) 17L, (ii) 17M, (ii) 170, (ii) 17P, (ii) 17Q or (ii) 17R wherein (i) the first variable domain is a VH domain and the first constant domain is a CH1 domain, and optionally the polypeptide is associated with a second polypeptide, wherein the second polypeptide comprises an antibody CL constant domain that is paired with the CH1 domain; (ii) the first variable domain is a VH domain and the first constant domain is a CL domain, and optionally the polypeptide is associated with a second polypeptide, wherein the second polypeptide comprises an antibody CH1 constant domain that is paired with the CL domain; (iii) the first variable domain is a VL domain and the first constant domain is a CH1 domain, and optionally the polypeptide is associated with a second polypeptide, wherein the second polypeptide comprises an antibody CL constant domain that is paired with the CH1 domain; or (iv) the first variable domain is a VL domain and the first constant domain is a CL domain, and optionally the polypeptide is associated with a second polypeptide, wherein the second polypeptide comprises an antibody CH1 constant domain that is paired with the CL domain.
[1199] 21. The polypeptide of any one of Aspects 16 to 20, comprising an antibody Fc region or a further antibody single variable domain between (v) the first variable domain or scFv and (vi) the SAM, wherein the Fc comprises a CH2 and a CH3.

[1200] This further variable domain may be different from the first single variable domain or may have a target binding specificity that is different from the target binding specificity of the first single variable domain or scFv.
[1201] 22. The polypeptide of any one of Aspects 16 to 21, comprising an antibody Fc region or an antibody single variable domain between (vii) the SAM and (viii) the most C-terminal variable domain, wherein the Fc comprises a CH2 and a CH3.
[1202] 23. The polypeptide of any one of Aspects 16 to 22, comprising in N- to C-terminal direction an antibody Fc region and the most N-terminal variable domain or scFv, wherein the Fc comprises a CH2 and a CH3.
[1203] 24. The polypeptide of any one of Aspects 16 to 23, comprising in N- to C-terminal direction the SAM and an antibody Fc region, wherein the Fc comprises a CH2 and a CH3.
[1204] 25. The polypeptide of any one of Aspects 17 to 24, wherein the CH2 is devoid of an amino acid sequence CXXC or an amino acid sequence selected from SEQ ID NOs: 180-182; and optionally is devoid of amino acid sequences SEQ ID NOs: 183-187.

[1205] In an example, the CH2 is a CH2′ disclosed herein. Optionally, the CH2 comprises (in N- to C- terminal direction) an optional upper hinge region, a lower hinge region and a CH2 domain and wherein the CH2 (and the polypeptide) is devoid of a core hinge region that is functional to dimerise the polypeptide with another said polypeptide. Optionally, the CH2 comprises in N- to C- terminal direction) an optional upper hinge region, a lower hinge region and a CH2 domain and the wherein the CH2 (and the polypeptide) is devoid of a core hinge region amino acid sequence CXXC, wherein X is any amino acid (optionally wherein each amino acid X is selected from a P, R and S). Optionally, the CH2 comprises in N- to C- terminal direction) an amino acid selected from SEQ ID NOs: 163-178 and a CH2 domain and the wherein the CH2 (and the polypeptide) is devoid of a core hinge region amino acid sequence CXXC, wherein X is any amino acid (optionally wherein each amino acid X is selected from a P, R and S). In an embodiment, the core hinge region amino acid sequence is selected from SEQ ID Nos: 180-182. In an embodiment, the CH2 (an the polyeptide) is devoid of amino acid sequences SEQ ID NOs: 183-187. In an embodiment, the CH2 domain is a human IgG1 CH2 domain and the core hinge region amino acid sequence is SEQ ID NO: 180. Optionally, any CH1 and CH3 present in the polypeptide are human IgG1 CH1 and CH3 respectively. Optionally, the CH2 (and the polypeptide) is devoid of a core hinge region amino acid sequence CPPC (SEQ ID NO: 180). Optionally, the CH2 (and the polypeptide) is devoid of upper hinge region amino acid sequence EPKSCDKTHT (SEQ ID NO: 183) and core hinge region amino acid sequence CPPC (SEQ ID NO: 180). In an embodiment, the CH2 domain is a human IgG2 CH2 domain and the core hinge region amino acid sequence is SEQ ID NO: 180. Optionally, any CH1 and CH3 present in the polypeptide are human IgG2 CH1 and CH3 respectively. Optionally, the CH2 (and the polypeptide) is devoid of upper hinge region amino acid sequence ERKCCVE (SEQ ID NO: 184) and core hinge region amino acid sequence CPPC (SEQ ID NO: 180). In an embodiment, the CH2 domain is a human IgG3 CH2 domain and the core hinge region amino acid sequence is SEQ ID NO: 181. Optionally, any CH1 and CH3 present in the polypeptide are human IgG3 CH1 and CH3 respectively. Optionally, the CH2 (and the polypeptide) is devoid of upper hinge region amino acid sequence ELKTPLGDTTHT (SEQ ID NO: 185) and core hinge region amino acid sequence CPRC (SEQ ID NO: 181). Optionally, alternatively the CH2 (and the polypeptide) is devoid of upper hinge region amino acid sequence EPKSCDTPPP (SEQ ID NO: 186) and core hinge region amino acid sequence CPRC (SEQ ID NO: 181). In an embodiment, the CH2 domain is a human IgG4 CH2 domain and the core hinge region amino acid sequence is SEQ ID NO: 182. Optionally, any CH1 and CH3 present in the polypeptide are human IgG4 CH1 and CH3 respectively. Optionally, the CH2 (and the polypeptide) is devoid of upper hinge region amino acid sequence ESKYGPP (SEQ ID NO: 187) and core hinge region amino acid sequence CPSC (SEQ ID NO: 182).

[1206] 26. The polypeptide of any preceding Aspect, wherein the first or each linker is a (G₄S)ₙ linker, wherein n=1, 2, 3, 4, 5, 6, 7, 8, 9 or 10.

[1207] In an example, n is 3. In an example, n is 4. In an example, n is 5.
[1208] 27. The polypeptide of any preceding Aspect, wherein each domain and SAM is a human domain and SAM respectively.
[1209] 28. The polypeptide of any preceding Aspect, wherein each variable domain or scFv is capable of binding to an antigen.

[1210] In an example, the binding antagonises the antigen. In another example, the binding agonises the antigen.

[1211] 29. The polypeptide of any preceding Aspect, wherein the polypeptide comprises binding specificity for more than one antigen, optionally 2, 3 or 4 different antigens.

[1212] For example, the polypeptide comprises at least one anti-CTLA-4 binding domain (eg, dAb or scFv) and at least one anti-4-1BB binding domain. For example, the polypeptide comprises at least one anti-CTLA-4 binding domain (eg, dAb or scFv) and at least one anti-PD-L1 binding domain. For example, the polypeptide comprises at least one anti-CTLA-4 binding domain (eg, dAb or scFv) and at least one anti-PD-1 binding domain. For example, the polypeptide comprises at least one anti-TNF alpha binding domain (eg, dAb or scFv) and at least one anti-IL-17A binding domain.

[1213] For example, the polypeptide comprises a first antigen binding domain (eg, a said VH, VL, VHH, dAb, scFv or Fab variable region) that is N-terminal of the SAM and a second antigen binding domain (eg, a said VH, VL, VHH, dAb, scFv or Fab variable region) that is C-terminal of the SAM. In an example, the polypeptide comprises a third antigen binding domain (eg, a said VH, VL, VHH, dAb, scFv or Fab variable region) that is N-terminal of the SAM (eg, and also N-terminal of the first domain; or between the first domain and the SAM); and optionally the polypeptide a fourth antigen binding domain (eg, a said VH, VL, VHH, dAb, scFv or Fab variable region) that is C-terminal of the SAM (eg, and also C-terminal of the second domain; or between the second domain and the SAM).

[1214] In an embodiment, the first domain is capable of specifically binding to an immune checkpoint or T-cell co-stimulatory antigen (eg, selected from OX40, GITR, VISTA, CD40, CD28, LAG3 and TIM-3) and the second binding site is capable of specifically binding to an immune checkpoint or T-cell co-stimulatory antigen (eg, selected from OX40, GITR, VISTA, CD40, CD28, LAG3 and TIM-3). In an example, the domains have the same antigen binding specificity. In an example, the domains have the same epitope binding specificity. In an example, the domains have different antigen binding specificity. In an example, the domains have different epitope binding specificity on the same antigen. In an example, the domains bind TNF alpha. In an example, the domains bind CD20. In an example, the domains bind PD-1. In an example, the domains bind PD-L1. In an example, the domains bind CTLA-4.

[1215] In an embodiment, the first domain is capable of specifically binding to 4-1BB, PD-1 or PD-L1 and the second binding site is capable of specifically binding to CTLA-4. In an embodiment, the second domain is capable of specifically binding to 4-1BB, PD-1 or PD-L1 and the first binding site is capable of specifically binding to CTLA-4. In an example, the first domain is capable of specifically binding to 4-1BB, the second binding site is capable of specifically binding to CTLA-4, the third binding site is capable of specifically binding to an immune checkpoint or T-cell co-stimulatory antigen (eg, selected from OX40, GITR, VISTA, CD40, CD28, LAG3 and TIM-3) and the fourth binding site is capable of specifically binding to an immune checkpoint or T-cell co-stimulatory antigen (eg, selected from OX40, GITR, VISTA, CD40, CD28, LAG3 and TIM-3). In an example, the first domain is capable of specifically binding to PD-1, the second binding site is capable of specifically binding to CTLA-4, the third binding site is capable of specifically binding to an immune checkpoint or T-cell co-stimulatory antigen (eg, selected from OX40, GITR, VISTA, CD40, CD28, LAG3 and TIM-3) and the fourth binding site is capable of specifically binding to an immune checkpoint or T-cell co-stimulatory antigen (eg, selected from OX40, GITR, VISTA, CD40, CD28, LAG3 and TIM-3). In an example, the first domain is capable of specifically binding to PD-L1, the second binding site is capable of specifically binding to CTLA-4, the third binding site is capable of specifically binding to CTLA-4, PD-L1, CD3 or CD28 and the fourth binding site is capable of specifically binding to an immune checkpoint or T-cell co-stimulatory antigen (eg, selected from OX40, GITR, VISTA, CD40, CD28, LAG3 and TIM-3).

[1216] In an embodiment, the first domain is capable of specifically binding to TNF alpha and the second binding site is capable of specifically binding to IL-17 (eg, IL-17A). In an embodiment, the second domain is capable of specifically binding to TNF alpha and the first binding site is capable of specifically binding to IL-17 (eg, IL-17A).

[1217] In an example, the polypeptide comprises a cytokine, eg, an IL-2, IL-15 or IL-21. In an example, the cytokine is a truncated cytokine, eg, a truncated IL-2, IL-15 or IL-21. In an example, the cytokine is C-terminal of the SAM (eg, C-terminal of the C-terminal most antigen binding domain). In an example, the cytokine is N-terminal of the SAM (eg, N-terminal of the N-terminal most antigen binding domain). In an embodiment of these examples, the first domain is capable of specifically binding to an immune checkpoint or T-cell co-stimulatory antigen (eg, selected from OX40, GITR, VISTA, CD40, CD28, LAG3 and TIM-3). In an embodiment of these examples, the first domain is capable of specifically binding to 4-1BB, PD-1, PD-L1 or CTLA-4. In an embodiment of these examples, the second domain is capable of specifically binding to an immune checkpoint or T-cell co-stimulatory antigen (eg, selected from OX40, GITR, VISTA, CD40, CD28, LAG3 and TIM-3). In an embodiment of these examples, the second domain is capable of specifically binding to 4-1BB, PD-1, PD-L1 or CTLA-4. In an embodiment of these examples, the third domain is capable of specifically binding to an immune checkpoint or T-cell co-stimulatory antigen (eg, selected from OX40, GITR, VISTA, CD40, CD28, LAG3 and TIM-3). In an embodiment of these examples, the third domain is capable of specifically binding to 4-1BB, PD-1, PD-L1 or CTLA-4. In an embodiment of these examples, the fourth domain is capable of specifically binding to an immune checkpoint or T-cell co-stimulatory antigen (eg, selected from OX40, GITR, VISTA, CD40, CD28, LAG3 and TIM-3). In an embodiment of these examples, the fourth domain is capable of specifically binding to 4-1BB, PD-1, PD-L1 or CTLA-4.

[1218] 30. A multimer (optionally a tetramer) of a polypeptide according to any preceding Aspect.

[1219] In an example, the multimer is a polypeptide dimer.

[1220] In an example, the multimer is a polypeptide trimer.

[1221] In an example, the multimer is a polypeptide tetramer.
[1222] 31. The polypeptide or multimer of any preceding Aspect, comprising eukaryotic cell glycosylation.
[1223] 32. The polypeptide or multimer of Aspect 31, wherein the cell is a HEK293, CHO or Cos cell.
[1224] 33. The polypeptide or multimer of any preceding Aspect for medical use.
[1225] 34. A pharmaceutical composition comprising the polypeptide or multimer of any preceding Aspect.
[1226] 35. A nucleic acid encoding a polypeptide of any one of Aspects 1 to 29 and 31 to 33.
[1227] 36. A eukaryotic cell or vector comprising the nucleic acid of Aspect 35.
[1228] 37. A method of binding multiple copies of an antigen, the method comprising combining the copies with a multimer of any one of Aspects 30 to 33, wherein the copies are bound by polypeptides of the multimer, and optionally the method comprising isolating the multimer bound to the antigen copies.
[1229] 38. The method of Aspect 37 wherein the method is a diagnostic method for detecting the presence of a substance in a sample, wherein the substance comprises the antigen, the method comprising providing the sample (eg, a bodily fluid, food, food ingredient, beverage, beverage ingredient, soil or forensic sample), mixing the sample with multimers according to any one of Aspects 30 to 33 and detecting the binding of multimers to the antigen in the sample.

[1230] In an example the bodily fluid is a blood, saliva, semen or urine sample.

[1231] In an example, the method is for pregnancy testing or diagnosing a disease or condition in a subject from which the sample has been previously obtained.
[1232] 39. A method of treating or reducing the risk of a disease or condition in a human or animal subject, the method comprising administering the composition of Aspect 34 to the subject, wherein multimers comprised by the composition specifically bind to a target antigen in the subject, wherein said binding mediates the treatment or reduction in risk.
[1233] 40. The method of Aspect 39, wherein the antigen is an immune checkpoint or T-cell co-stimulatory antigen (eg, PD-L1, PD-1 or CTLA4); or wherein the antigen is TNF alpha or IL-17A.
[1234] 41. The method of Aspect 39, wherein the antigen mediates the disease or condition in the subject; and optionally wherein the binding antagonises the antigen.

[1235] In another embodiment, the binding agonises the antigen.
[1236] 42. A composition comprising a plurality of polypeptides according to any one of Aspects 1 to 29 and 31 to 33, wherein at least 90% of the polypeptides are comprised by tetramers of said polypeptides.

[1237] Optionally, at least 91, 92, 93, 94, 95, 96, 97, 98 or 99% of the polypeptides are comprised by tetramers of said polypeptides.
[1238] 43. The composition of Aspect 42, wherein at least 98% of the polypeptides are comprised by tetramers of said polypeptides.
[1239] 44. The composition of Aspect 42 or 43, wherein the remaining (ie, the balance to 100% of polypeptide) polypeptides are selected from one or more of polypeptide monomers, dimers and trimers.
[1240] 45. A method of producing a composition (optionally a composition according to any one of Aspects 42 to 44) comprising a plurality of polypeptides according to any one of Aspects 1 to 29 and 31 to 33, the method comprising providing eukaryotic host cells according to Aspect 34, culturing the host cells, and allowing expression and secretion from the cells of tetramers of the polypeptides, and optionally isolating or purifying the tetramers.
Any of these Aspects is combinable with any other disclosure herein, eg, any of the Clauses or Paragraphs.

### Polypeptides & Multimers Comprising Fc

[1241] The invention also provides polypeptides and multimers comprising antibody Fc region(s). This is useful, for example, to harness FcRn recycling when administered to a subject, such as a human or animal, which may contribute to a desirable half-life in vivo. Fc regions are also useful for providing Fc effector functions. For example, an IgG1 Fc may be useful when the multimer is used to treat a cancer or where cell killing is desired, eg, by ADCC.

[1242] To this end, the invention provides the following:

[1243] A polypeptide comprising an antibody Fc region, wherein the Fc region comprises an antibody CH2 and an antibody CH3; and a self-associating multimerisation domain (SAM); wherein the CH2 comprises an antibody hinge sequence and is devoid of a core hinge region.

[1244] In an embodiment, the polypeptide comprises an epitope binding site, eg, an antibody VH single variable domain or an antibody VH/VL pair that binds to an epitope. Additionally or alternatively, the polypeptide comprises an epitope which is cognate to an antibody. This is useful, for example, as the polypeptide can form a multimer that binds copies of the antibodies, such as when the multimer is contacted with a sample comprising the antibodies (eg, for medical use as disclosed herein). In this way, for example, the multimer can be used in a method of diagnosis or testing to determine the presence and/or quantity (or relative amount) of the antibody in the sample. As the multimer provides multiple copies of the epitope (at least one for each polypeptide comprised by the multimer), this can be useful to bind many copies of the antibody, which may be present in relatively small amounts in the sample, thereby having the effect of enhancing the chances of detecting (or amplifying) a positive signal denoting presence of the antibody. Thus, assay sensitivity may be enhanced so that relatively rare antibodies in samples can be detected.

[1245] Optionally, the CH2 is devoid of (i) a core hinge CXXC amino acid sequence, wherein X is any amino acid or wherein each amino acid X is selected from a P, R and S; and/or (ii) an upper hinge amino acid sequence. For the CH2 is devoid of (i) a core hinge CXXC amino acid sequence, wherein X is any amino acid or wherein each amino acid X is selected from a P, R and S and the Fc does not directly pair with another Fc.

[1246] Optionally, the CXXC sequence is selected from SEQ ID NOs: 180-182; or the CH2 is devoid of amino acid sequences SEQ ID NOs: 183-187.

[1247] Optionally, the CH2 comprises
[1248] A. amino acid sequence APELLGGPSV (SEQ ID NO: 163), or PAPELLGGPSV (SEQ ID NO: 164);
[1249] B. amino acid sequence APPVAGPSV (SEQ ID NO: 165), or PAPPVAGPSV (SEQ ID NO: 166);
[1250] C. amino acid sequence APEFLGGPSV (SEQ ID NO: 175), or PAPEFLGGPSV (SEQ ID NO: 176);
[1251] D. amino acid sequence EPKSCDKTHT[P]APELLGGPSV (SEQ ID NO: 167 or 168), wherein the bracketed P is optional;
[1252] E. amino acid sequence ERKCCVE[P]APPVAGPSV (SEQ ID NO: 169 or 170), wherein the bracketed P is optional;
[1253] F. amino acid sequence ELKTPLGDTTHT[P]APELLGGPSV (SEQ ID NO: 171 or 172), wherein the bracketed P is optional;
[1254] G. amino acid sequence EPKSCDTPPP[P]APELLGGPSV (SEQ ID NO: 173 or 174), wherein the bracketed P is optional; or
[1255] H. amino acid sequence ESKYGPP[P]APEFLGGPSV (SEQ ID NO: 177 or 178), wherein the bracketed P is optional.

[1256] Optionally, the CH2 comprises (in N- to C- terminal direction) an optional upper hinge region, a lower hinge region and a CH2 domain and wherein the CH2 (and the polypeptide) is devoid of a core hinge region that is functional to dimerise the polypeptide with another said polypeptide. Optionally, the CH2 comprises in N- to C- terminal direction) an optional upper hinge region, a lower hinge region and a CH2 domain and the wherein the CH2 (and the polypeptide) is devoid of a core hinge region amino acid sequence CXXC, wherein X is any amino acid (optionally wherein each amino acid X is selected from a P, R and S). Optionally, the CH2 comprises in N- to C- terminal direction) an amino acid selected from SEQ ID NOs: 163-178 and a CH2 domain and the wherein the CH2 (and the polypeptide) is devoid of a core hinge region amino acid sequence CXXC, wherein X is any amino acid (optionally wherein each amino acid X is selected from a P, R and S). In an embodiment, the core hinge region amino acid sequence is selected from SEQ ID Nos: 180-182. In an embodiment, the CH2 (an the polyeptide) is devoid of amino acid sequences SEQ ID NOs: 183-187. In an embodiment, the CH2 domain is a human IgG1 CH2 domain and the core hinge region amino acid sequence is SEQ ID NO: 180. Optionally, any CH1 and CH3 present in the polypeptide are human IgG1 CH1 and CH3 respectively. Optionally, the CH2 (and the polypeptide) is devoid of a core hinge region amino acid sequence CPPC (SEQ ID NO: 180). Optionally, the CH2 (and the polypeptide) is devoid of upper hinge region amino acid sequence EPKSCDKTHT (SEQ ID NO: 183) and core hinge region amino acid sequence CPPC (SEQ ID NO: 180). In an embodiment, the CH2 domain is a human IgG2 CH2 domain and the core hinge region amino acid sequence is SEQ ID NO: 180. Optionally, any CH1 and CH3 present in the polypeptide are human IgG2 CH1 and CH3 respectively. Optionally, the CH2 (and the polypeptide) is devoid of upper hinge region amino acid sequence ERKCCVE (SEQ ID NO: 184) and core hinge region amino acid sequence CPPC (SEQ ID NO: 180). In an embodiment, the CH2 domain is a human IgG3 CH2 domain and the core hinge region amino acid sequence is SEQ ID NO: 181. Optionally, any CH1 and CH3 present in the polypeptide are human IgG3 CH1 and CH3 respectively. Optionally, the CH2 (and the polypeptide) is devoid of upper hinge region amino acid sequence ELKTPLGDTTHT (SEQ ID NO: 185) and core hinge region amino acid sequence CPRC (SEQ ID NO: 181). Optionally, alternatively the CH2 (and the polypeptide) is devoid of upper hinge region amino acid sequence EPKSCDTPPP (SEQ ID NO: 186) and core hinge region amino acid sequence CPRC (SEQ ID NO: 181). In an embodiment, the CH2 domain is a human IgG4 CH2 domain and the core hinge region amino acid sequence is SEQ ID NO: 182. Optionally, any CH1 and CH3 present in the polypeptide are human IgG4 CH1 and CH3 respectively. Optionally, the CH2 (and the polypeptide) is devoid of upper hinge region amino acid sequence ESKYGPP (SEQ ID NO: 187) and core hinge region amino acid sequence CPSC (SEQ ID NO: 182).

[1257] Optionally, the polypeptide comprises an antibody CH1-hinge sequence devoid of core region-CH2-CH3.

[1258] Optionally, the CH2 and CH3 comprise
[1259] A. human IgG1 CH2 and CH3 domains;
[1260] B. human IgG2 CH2 and CH3 domains;
[1261] C. human IgG3 CH2 and CH3 domains; or
[1262] D. human IgG4 CH2 and CH3 domains.

[1263] Optionally, the CH2 and CH3 comprise
[1264] (a) human IgG1 CH2 and CH3 domains and the hinge sequence and core hinge region is a human IgG1 hinge sequence and hinge region;
[1265] (b) human IgG2 CH2 and CH3 domains and the hinge sequence and core hinge region is a human IgG2 hinge sequence and hinge region;
[1266] (c) human IgG3 CH2 and CH3 domains and the hinge sequence and core hinge region is a human IgG31 hinge sequence and hinge region; or
[1267] (d) human IgG4 CH2 and CH3 domains and the hinge sequence and core hinge region is a human IgG4 hinge sequence and hinge region

[1268] Optionally,
[1269] A. the CH2 domain comprises a human IgG1 CH2 domain and the core hinge region amino acid sequence is SEQ ID NO: 180, optionally wherein the CH2 is devoid of upper hinge region amino acid sequence EPKSCDKTHT (SEQ ID NO: 183);
[1270] B. the CH2 domain comprises a human IgG2 CH2 domain and the core hinge region amino acid sequence is SEQ ID NO: 180, optionally wherein the CH2 is devoid of upper hinge region amino acid sequence ERKCCVE (SEQ ID NO: 184);
[1271] C. the CH2 domain comprises a human IgG3 CH2 domain and the core hinge region amino acid sequence is SEQ ID NO: 181, optionally wherein the CH2is devoid of upper hinge region amino acid sequence ELKTPLGDTTHT (SEQ ID NO: 185) or upper hinge region amino acid sequence EPKSCDTPPP (SEQ ID NO: 186); or
[1272] D. the CH2 domain comprises a human IgG4 CH2 domain and the core hinge region amino acid sequence is SEQ ID NO: 182, and optionally wherein the CH2 is devoid of upper hinge region amino acid sequence ESKYGPP (SEQ ID NO: 187).

[1273] Optionally, the polypeptide comprises (in N- to C-terminal direction) the Fc region and the SAM, the Fc region comprising (in N- to C-terminal direction) the hinge sequence, a CH2 domain and a CH3 domain.

[1274] Optionally, the polypeptide comprises one or more epitope binding sites, eg, an antibody variable domain that is capable of specifically binding to a first epitope. Optionally, the first epitope is comprised by an antigen (eg, a human antigen) selected from the group consisting of ABCF1; ACVR1; ACVR1B; ACVR2; ACVR2B; ACVRL1; ADORA2A; Aggrecan; AGR2; AICDA; AWI; AIG1; AKAP1; AKAP2; AIYIH; AMHR2; ANGPT1; ANGPT2; ANGPTL3; ANGPTL4; ANPEP; APC; APOC1; AR; AZGP1 (zinc-a-glycoprotein); B7.1; B7.2; BAD; BAFF; BAG1; BAI1; BCL2; BCL6; BDNF; BLNK; BLR1 (MDR15); BlyS; BM Pl; BMP2; BMP3B (GDFIO); BMP4; BMP6; BM P8; BMPRIA; BMPRIB; BM PR2; BPAG1 (plectin); BRCA1; CI9orflO (IL27w); C3; C4A; C5; C5R1; CANT1; CASP1; CASP4; CAV1; CCBP2 (D6 / JAB61); CCL1 (1-309); CCL11 (eotaxin); CCL13 (MCP-4); CCL15 (MIP-id); CCL16 (HCC-4); CCL17 (TARC); CCL18 (PARC); CCL19 (M IP-3b); CCL2 (MCP-1); MCAF; CCL20 (MIP-3a); CCL21 (MIP-2); SLC; exodus-2; CCL22 (MDC / STC-1); CCL23 (M PIF-1); CCL24 (MPIF-2 I eotaxin-2); CCL25 (TECK); CCL26 (eotaxin-3); CCL27 (CTACK /ILC) ; CCL28; CCL3 (MIP-la); CCL4 (M IP-lb); CCL5 (RANTES); CCL7 (MCP-3); CCL8 (mcp-2); CCNA1; CCNA2; CCND1; CCNE1; CCNE2; CCR1 (CKR1 / HM145); CCR2 (mcp-1RB / RA);CCR3 (CKR3 / CMKBR3); CCR4; CCR5 (CM KBR5 / ChemR13); CCR6 (CMKBR6 / CKR-L3 / STRL22 / DRY6); CCR7 (CKR7 / EBI1); CCR8 (CM KBR8 / TER1 / CKR-L1); CCR9 (GPR-9-6); CCRL1 (VSHK1); CCRL2 (L-CCR); CD164; CD19; CD1C; CD20; CD200; CD-22; CD24; CD28; CD3; CD37; CD38; CD3E; CD3G; CD3Z; CD4; CD40; CD40L; CD44; CD45RB; CD52; CD69; CD72; CD74; CD79A; CD79B; CD8; CD80; CD81; CD83; CD86; CDH1 (E-cadherin); CDH10; CDH12; CDH13; CDH18; CDH19; CDH20; CDH5; CDH7; CDH8; CDH9; CDK2; CDK3; CDK4; CDK5; CDK6; CDK7; CDK9; CDKN1A (p2IWapl/Cipl); CDKN1B (p27Kipl); CDKNIC; CDKN2A (pl6INK4a); CDKN2B; CDKN2C; CDKN3; CEBPB; CER1; CHGA; CHGB; Chitinase; CHST10; CKLFSF2; CKLFSF3; CKLFSF4; CKLFSF5; CKLFSF6; CKLFSF7; CKLFSF8; CLDN3; CLDN7 (claudin-7); CLN3; CLU (clusterin); CMKLR1; CMKOR1 (RDC1); CNR1; COL18A1; COL1A1; COL4A3; COL6A1; CR2; CRP; CSF1 (M-CSF); CSF2 (GM-CSF); CSF3 (GCSF); CTLA4; CTNNB1 (b-catenin); CTSB (cathepsin B); CX3CL1 (SCYDi) ; CX3CR1 (V28); CXCL1 (GROl); CXCLIO (IP-10); CXCL11 (1-TAC / IP-9); CXCL12 (SDF1); CXCL13; CXCL14; CXCL16; CXCL2 (GR02); CXCL3 (GR03); CXCL5 (ENA-78 I LIX); CXCL6 (GCP-2); CXCL9 (MIG); CXCR3 (GPR9/CKR-L2); CXCR4; CXCR6 (TYMSTR ISTRL33 I Bonzo); CYB5; CYC1; CYSLTR1; DAB2IP; DES; DKFZp451J0118; DNCL1; DPP4; E2F1; ECGF1; EDG1; EFNAI; EFNA3; EFNB2; EGF; EGFR; ELAC2; ENG; EN01; EN02; EN03; EPHB4; EPO; ERBB2 (Her-2); EREG; ERK8; ESR1; ESR2; F3 (TF); FADD; FasL; FASN; FCER1A; FCER2; FCGR3A; FGF; FGF1 (aFGF); FGF10; FGF11; FGF12; FGF12B; FGF13; FGF14; FGF16; FGF17; FGF18; FGF19; FGF2 (bFGF); FGF20; FGF21; FGF22; FGF23; FGF3 (int-2); FGF4 (HST); FGF5; FGF6 (HST-2); FGF7 (KGF); FGF8; FGF9; FGFR3; FIGF (VEGFD); FILl (EPSILON); FILl (ZETA); FU12584; FU25530; FLRTl (fibronectin); FLTl; FOS; FOSLl (FRA-I); FY (DARC); GABRP (GABAa); GAGEB1; GAGEC1; GALNAC4S-65T; GATA3; GDF5; GFI1; GGT1; GM-CSF; GNAS1; GNRHl; GPR2 (CCRIO); GPR31; GPR44; GPR81 (FKSG80); GRCCIO (CIO); GRP; GSN (Gelsolin); GSTPl; HAVCR2; HDAC4; EDAC5; HDAC7A; HDAC9; HGF; HIF1A; HIP1; histamine and histamine receptors; HLA-A; HLA-DRA; HM74; HMOX1; HUMCYT2A; ICEBERG; ICOSL; 1D2; IFN-a; IFNA1; IFNA2; IFNA4; IFNA5; IFNA6; IFNA7; IFNB1; IFNgamma; TFNW1; IGBP1; IGF1; IGF1R; IGF2; IGFBP2; IGFBP3; IGFBP6; IL-1; IL10; IL10RA; IL10RB; IL11; IL11RA; IL-12; IL12A; IL12B; IL12RB1; IL12RB2; 1L13; IL13RA1; IL13RA2; 1L14; 1L15; IL15RA; IL16; 1L17; IL17B; IL17C; IL17R; 1L18; IL18BP; IL18R1; IL18RAP; 1L19; ILIA; IL1B; IL1F10; IL1F5; IL1F6; IL1F7; IL1F8; IL1F9; IL1HY1; IL1R1; IL1R2; IL1RAP; IL1RAPL1; IL1RAPL2; IL1RL1;IL1RL2 IL1RN; 1L2; 1L20; IL20RA; IL21R; 1L22; 1L22R; 1L22RA2; 1L23; 1L24; 1L25; 1L26; 1L27; 1L28A; 1L28B; 1L29; IL2RA; IL2RB; IL2RG; 1L3; 1L30; IL3RA; 1L4; IL4R; 1L5; IL5RA; 1L6; IL6R; IL6ST (glycoprotein 130); 1L7; TL7R; 1L8; IL8RA; IL8RB; IL8RB; 1L9; IL9R; ILK; INHA; INHBA; INSL3; INSL4; IRAKI; IRAK2; ITGA1; ITGA2; 1TGA3; ITGA6 (a6 integrin); ITGAV; ITGB3; ITGB4 (b 4 integrin); JAG1; JAK1; JAK3; JUN; K6HF; KAI1; KDR; MTLG; KLF5 (GC Box BP); KLF6; KLK10; KLK12; KLK13; KLK14; KLK15; KLK3; KLK4; KLK5; KLK6; KLK9; KRT1; KRT19 (Keratin 19); KRT2A; KRTHB6 (hair-specific type II keratin); LAMA5; LEP (leptin); Lingo-p75; Lingo-Troy; LPS; LTA (TNF-b); LTB; LTB4R (GPR16); LTB4R2; LTBR; MACMARCKS; MAG or Omgp; MAP2K7 (c-Jun); MDK; M IB1; midkine; M IF; M IP-2; MK167 (Ki-67); MMP2; M MP9; MS4A1; MSMB; MT3 (metallothionectin-ifi); MTSS 1; M UC 1 (mucin); MYC; MYD88; NCK2; neurocan; NFKB 1; NFKB2; NGFB (NGF); NGFR; NgR-Lingo; NgR-Nogo66 (Nogo); NgR-p75; NgR-Troy; NM E1 (NM23A); NOX5; NPPB; NROB1; NROB2; NR1D1; NR1D2; NR1H2; NR1H3; NR1H4; NR1I2; NR1I3; NR2C1; NR2C2; NR2E1; NR2E3; NR2F1; NR2F2; NR2F6; NR3C1; NR3C2; NR4A1; NR4A2; NR4A3; NR5A1; NR5A2; NR6A1; NRP1; NRP2; NT5E; NTN4; ODZ1; OPRD1; P2RX7; PAP; PARTI; PATE; PAWR; PCA3; PCNA; PDGFA; PDGFB; PECAM1; PF4 (CXCL4); PGF; PGR; phosphacan; PIAS2; PIK3CG; PLAU (uPA); PLG; PLXDC1; PPBP (CXCL7); PPID; PR1; PRKCQ; PRKD1; PRL; PROC; PROK2; PSAP; PSCA; PTAFR; PTEN; PTGS2 (COX-2); PTN; RAC2 (p2IRac2); RARB; RGS1; RGS13; RGS3; RNF110 (ZNF144); ROB02; S100A2; SCGB1D2 (lipophilin B); SCGB2A1 (mammaglobin 2); SCGB2A2 (mammaglobin 1); SCYE1 (endothelial Monocyte-activating cytokine); SDF2; SERPINA1; SERPINIA3; SERPINB5 (maspin); SERPINE1 (PAT-i); SERPINF1; SHBG; SLA2; SLC2A2; SLC33A1; SLC43A1; SLIT2; SPPl; SPRRIB (Spri); ST6GAL1; STABl; STAT6; STEAP; STEAP2; TB4R2; TBX21; TCPIO; TDGF1; TEK; TGFA; TGFB1; TGFB1I1; TGFB2; TGFB3; TGFBI; TGFBR1; TGFBR2; TGFBR3; TH1L; THBS1(thrombospondin-1); THBS2; THBS4; THPO; TIE (Tie-i); T]MP3; tissue factor; TLRIO; TLR2; TLR3; TLR4; TLR5; TLR6; TLR7; TLR8; TLR9; TNF; TNF-a; TNFAIP2 (B94); TNFAIP3; TNFRSF1 1A; TNFRSF1A; TNFRSF1B; TNFRSF21; TNFRSF5; TNFRSF6 (Fas); TNFRSF7; TNFRSF8; TNFRSF9; TNFSFIO (TRAIL); TNFSF1 1 (TRANCE); TNFSF12 (AP03L); TNFSF13 (April); TNFSF13B; TNFSF14 (HVEM-L); TNFSF1 5 (VEGI); TNFSF1 8; TNFSF4 (0X40 ligand); TNFSF5 (CD40 ligand); TNFSF6 (FasL); TNFSF7 (CD27 ligand); TNFSF8 (CD30 ligand); TNFSF9 (4-1BB ligand); TOLLIP; Toll-like receptors; TOP2A (topoisomerase lia); TP53; TPM 1; TPM2; TRADD; TRAF1; TRAF2; TRAF3; TRAF4; TRAF5; TRAF6; TREM 1; TREM2; TRPC6; TSLP; TWEAK; VEGF; VEGFB; VEGFC; versican; VHL C5; VLA-4; XCL1 (lymphotactin); XCL2 (SCM-lb); XCR1 (GPR5 / CCXCR1); YY1; and ZFPM2. Optionally, the second epitope (as discussed below) is comprised by the same antigen as the first epitope (eg, comprised by the same antigen molecule). In another example, the second antigen is comprised by said group. In an example, the first and second epitopes are comprised by different antigens selected from said group.

[1275] For example, the polypeptide has 1, 2, 3, 4 or 5 epitope binding sites (optionally wherein the polypeptide comprises 2 or more binding sites (eg, single variable domains) that bind to different epitopes, or wherein the polypeptide binding sites are identical). In an embodiment, the SAM is a TD (eg, a p53 TD, such as a human p53 TD) and the polypeptide has 2, 3 or 4 binding sites, such as 3 sites or such as 4 sites. Preferably, the polypeptide has 3 binding sites. Preferably, the polypeptide has 4 binding sites. For example, the binding sites each binds TNF alpha (eg, wherein the binding sites are identical, eg, identical antibody single variable domains).

[1276] In an example, the multimer is an octavalent bispecific multimer comprising 4 copies of an anti-PD-L1binding site (eg, dAb) and 4 copies of an anti-4-1BB binding site (eg, dAb).

[1277] In an example, the multimer is a tetravalent multimer comprising copies of an anti-PD-L1 binding site (eg, dAb). In an example, the multimer is an octavalent multimer comprising copies of an anti-PD-L1 binding site (eg, dAb). In an example, the multimer is a 12-valent multimer comprising copies of an anti-PD-L1 binding site (eg, dAb). In an example, the multimer is a 16-valent multimer comprising copies of an anti-PD-L1 binding site (eg, dAb). In an example, the anti-PD-L1 binding site comprises an avelumab or atezolizumab binding site that specifically binds to PD-L1. Preferably, in these examples the SAM domain is a TD, eg, a p53 TD, such as a human p53 TD. For the tetramer, each polypeptide comprises one copy of the binding site. For the octamer each polypeptide comprises 2 copies of the binding site. For the 12-mer each polypeptide comprises 3 copies of the binding site. For the 16-mer each polypeptide comprises 4 copies of the binding site.

[1278] In an example, the multimer is a tetravalent multimer comprising copies of an anti-PD-1 binding site (eg, dAb). In an example, the multimer is an octavalent multimer comprising copies of an anti-PD-1 binding site (eg, dAb). In an example, the multimer is a 12-valent multimer comprising copies of an anti-PD-1 binding site (eg, dAb). In an example, the multimer is a 16-valent multimer comprising copies of an anti-PD-1 binding site (eg, dAb). In an example, the anti- PD-1 binding site comprises a nivolumab or pembrolizumab binding site that specifically binds to PD-1. Preferably, in these examples the SAM domain is a TD, eg, a p53 TD, such as a human p53 TD. For the tetramer, each polypeptide comprises one copy of the binding site. For the octamer each polypeptide comprises 2 copies of the binding site. For the 12-mer each polypeptide comprises 3 copies of the binding site. For the 16-mer each polypeptide comprises 4 copies of the binding site.

[1279] In an example, the multimer is a tetravalent multimer comprising copies of an anti-DR5 (Death Receptor 5) binding site (eg, dAb). In an example, the multimer is an octavalent multimer comprising copies of an anti-DR5 binding site (eg, dAb). In an example, the multimer is a 12-valent multimer comprising copies of an anti-DR5 binding site (eg, dAb). In an example, the multimer is a 16-valent multimer comprising copies of an anti-DR5 binding site (eg, dAb). Preferably, in these examples the SAM domain is a TD, eg, a p53 TD, such as a human p53 TD. For the tetramer, each polypeptide comprises one copy of the binding site. For the octamer each polypeptide comprises 2 copies of the binding site. For the 12-mer each polypeptide comprises 3 copies of the binding site. For the 16-mer each polypeptide comprises 4 copies of the binding site.

[1280] In an example, the multimer is a tetravalent multimer comprising copies of an anti-OX40 or OX40L binding site (eg, dAb). In an example, the multimer is an octavalent multimer comprising copies of an anti-OX40 or OX40L binding site (eg, dAb). In an example, the multimer is a 12-valent multimer comprising copies of an anti- OX40 or OX40L binding site (eg, dAb). In an example, the multimer is a 16-valent multimer comprising copies of an anti- OX40 or OX40L binding site (eg, dAb). Preferably, in these examples the SAM domain is a TD, eg, a p53 TD, such as a human p53 TD. For the tetramer, each polypeptide comprises one copy of the binding site. For the octamer each polypeptide comprises 2 copies of the binding site. For the 12-mer each polypeptide comprises 3 copies of the binding site. For the 16-mer each polypeptide comprises 4 copies of the binding site.

[1281] In an example, the multimer is a tetravalent multimer comprising copies of an anti-glucocorticoid-induced tumor necrosis factor receptor (GITR) binding site (eg, dAb). In an example, the multimer is an octavalent multimer comprising copies of an anti-GITR binding site (eg, dAb). In an example, the multimer is a 12-valent multimer comprising copies of an anti-GITR binding site (eg, dAb). In an example, the multimer is a 16-valent multimer comprising copies of an anti-GITR binding site (eg, dAb). Preferably, in these examples the SAM domain is a TD, eg, a p53 TD, such as a human p53 TD. For the tetramer, each polypeptide comprises one copy of the binding site. For the octamer each polypeptide comprises 2 copies of the binding site. For the 12-mer each polypeptide comprises 3 copies of the binding site. For the 16-mer each polypeptide comprises 4 copies of the binding site.

[1282] In an example, the multimer is a tetravalent multimer comprising copies of an anti-antibody kappa light chain (KLC) binding site (eg, dAb). In an example, the multimer is an octavalent multimer comprising copies of an anti-KLC binding site (eg, dAb). In an example, the multimer is a 12-valent multimer comprising copies of an anti-KLC binding site (eg, dAb). In an example, the multimer is a 16-valent multimer comprising copies of an anti-KLC binding site (eg, dAb). Preferably, in these examples the SAM domain is a TD, eg, a p53 TD, such as a human p53 TD. For the tetramer, each polypeptide comprises one copy of the binding site. For the octamer each polypeptide comprises 2 copies of the binding site. For the 12-mer each polypeptide comprises 3 copies of the binding site. For the 16-mer each polypeptide comprises 4 copies of the binding site.

[1283] In an example, the multimer is a tetravalent multimer comprising copies of an anti-VEGF binding site (eg, dAb). In an example, the multimer is an octavalent multimer comprising copies of an anti-VEGF binding site (eg, dAb). In an example, the multimer is a 12-valent multimer comprising copies of an anti-VEGF binding site (eg, dAb). In an example, the multimer is a 16-valent multimer comprising copies of an anti-VEGF binding site (eg, dAb). In an example, the anti-VEGF binding site comprises a VEGF receptor domain that specifically binds to VEGF (eg, a VEGF binding site of human flt (eg, flt-1) or KDR, eg, Ig domain 2 from VEGFR1 or Ig domain 3 from VEGFR2)). In an example, the anti-VEGF binding site comprises an aflibercept, bevacizumab or ranibizumab binding site that specifically binds to VEGF. Preferably, in these examples the SAM domain is a TD, eg, a p53 TD, such as a human p53 TD. For the tetramer, each polypeptide comprises one copy of the binding site. For the octamer each polypeptide comprises 2 copies of the binding site. For the 12-mer each polypeptide comprises 3 copies of the binding site. For the 16-mer each polypeptide comprises 4 copies of the binding site.

[1284] In an example, the multimer is a tetravalent multimer comprising copies of an anti-TNF alpha binding site (eg, dAb). In an example, the multimer is a tetravalent multimer comprising copies of an anti-TNF alpha binding site (eg, dAb). In an example, the multimer is an octavalent multimer comprising copies of an anti-TNF alpha binding site (eg, dAb). In an example, the multimer is a 12-valent multimer comprising copies of an anti-TNF alpha binding site (eg, dAb). In an example, the multimer is a 16-valent multimer comprising copies of an anti-TNF alpha binding site (eg, dAb). Preferably, in these examples the SAM domain is a TD, eg, a p53 TD, such as a human p53 TD. For the tetramer, each polypeptide comprises one copy of the binding site. For the octamer each polypeptide comprises 2 copies of the binding site. For the 12-mer each polypeptide comprises 3 copies of the binding site. For the 16-mer each polypeptide comprises 4 copies of the binding site.

[1285] Optionally, the variable domain is selected from an antibody single variable domain, a VH and a VL; or wherein the domain is comprised by an scFv. Optionally, the domain is comprised by an antibody VH/VL pair that binds to said first epitope. In an example, epitope binding herein is specific binding as herein defined.

[1286] Optionally, the polypeptide comprises (in N- to C-terminal direction)
[1287] A. the variable domain, the SAM and the Fc region;
[1288] B. the Fc region, the SAM and the variable domain;
[1289] C. the variable domain, the Fc region and the SAM;
[1290] D. the SAM, the variable domain and the Fc region; or
[1291] E. the SAM, the Fc region and the variable domain.

[1292] Optionally, the polypepide comprises a second antibody variable domain N- or C-terminal to the SAM, wherein the second variable domain is capable of specifically binding to a second epitope, wherein the first and second epitopes are identical or different.

[1293] Optionally, the SAM is a self-associating tetramerisation domain (TD); optionally wherein the TD is a p53, p63 or p73 TD or a homologue or orthologue thereof; or wherein the TD is a NHR2 TD or a homologue or orthologue thereof; or wherein the TD comprises an amino acid sequence that is at least 80, 85, 90, 91, 92, 93, 94, 95, 96, 97, 98 or 99% identical to SEQ ID NO: 10 or 126.

[1294] Optionally,
[1295] (i) the polypeptide comprises (in N- to C-terminal direction);
   [1296] A. A first antibody single variable domain (dAb), an optional linker and said SAM;
   [1297] B. A first antibody single variable domain, an optional linker, said SAM and a second antibody single variable domain;
   [1298] C. A first scFv, an optional linker and said SAM;
   [1299] D. A first scFv, an optional linker, said SAM and a second scFv;
   [1300] E. A first antibody single variable domain, an optional linker, said SAM and a first scFv;
   [1301] F. A first scFv, an optional linker, said SAM and a first antibody single variable domain;
   [1302] G. A first antibody variable domain, an optional first linker, a first antibody constant domain, a second optional linker and said SAM;
   [1303] H. Said SAM, an optional linker and a first antibody single variable domain;
   [1304] I. Said SAM, an optional linker and a first scFv;
   [1305] J. Said SAM, an optional linker, a first antibody constant domain, a second optional linker and a first antibody variable domain; or
   [1306] K. Said SAM, an optional linker, a first antibody variable domain, a second optional linker and a first antibody constant domain;
   Or
[1307] (ii) the polypeptide comprises (in N- to C-terminal direction);
   [1308] A. A dAb and the SAM;
   [1309] B. A first dAb, the SAM and a second dAb;
   [1310] C. A first scFv and the SAM;
   [1311] D. A first scFv, the SAM and a second scFv;
   [1312] E. A first scFv, the SAM and a first dAb;
   [1313] F. A first dAb, the Fc region and the SAM;
   [1314] G. A first scFv, the Fc region and the SAM;
   [1315] H. A VH, a CH1, the Fc region and the SAM;
   [1316] I. A VL, a CL, the Fc region and the SAM;
   [1317] J. A dAb; the SAM and the Fc region;
   [1318] K. A scFv; the SAM and the Fc region;
   [1319] L. A VH, a CH1, the SAM and the Fc region;
   [1320] M. A VL, a CL, the SAM and the Fc region;
   [1321] N. A first dAb, a second dAb and the SAM;
   [1322] O. A VH, a CH1 and the SAM;
   [1323] P. A VL, a CL and the SAM;
   [1324] Q. A VH, a CH1, the SAM and a first dAb;
   [1325] R. A VL, a CL, the SAM and a first dAb;
   [1326] S. A first dAb, a second dAb, the SAM and a third dAb;
   [1327] T. A first dAb, a second dAb, the SAM and a first scFv;
   [1328] U. A first dAb, a second dAb, the SAM, a third dAb and a fourth dAb;
   [1329] V. A first dAb, the Fc region, the SAM and a second dAb;
   [1330] W. A first dAb, the Fc region, the SAM and a first scFv;
   [1331] X. A first dAb, a second dAb, the Fc region and the SAM;
   [1332] Y. A first dAb, a second dAb, the Fc region, the SAM and a third dAb;
   [1333] Z. A first dAb, a second dAb, the Fc region, the SAM and a first scFv; or
   [1334] AA. A first dAb, a second dAb, the Fc region, the SAM, a third dAb and a fourth dAb;
   Or
[1335] (iii) the polypeptide comprises (in C- to N-terminal direction);
   [1336] A. A dAb and the SAM;
   [1337] B. A first dAb, the SAM and a second dAb;
   [1338] C. A first scFv and the SAM;
   [1339] D. A first scFv, the SAM and a second scFv;
   [1340] E. A first scFv, the SAM and a first dAb;
   [1341] F. A first dAb, the Fc region and the SAM;
   [1342] G. A first scFv, the Fc region and the SAM;
   [1343] H. A VH, a CH1, the Fc regionand the SAM;
   [1344] I. A VL, a CL, the Fc region and the SAM;
   [1345] J. A dAb; the SAM and the Fc region;
   [1346] K. A scFv; the SAM and the Fc region;
   [1347] L. A VH, a CH1, the SAM and the Fc region;
   [1348] M. A VL, a CL, the SAM and the Fc region;
   [1349] N. A first dAb, a second dAb and the SAM;
   [1350] O. A VH, a CH1 and the SAM;
   [1351] P. A VL, a CL and the SAM;
   [1352] Q. A VH, a CH1, the SAM and a first dAb;
   [1353] R. A VL, a CL, the SAM and a first dAb;
   [1354] S. A first dAb, a second dAb, the SAM and a third dAb;
   [1355] T. A first dAb, a second dAb, the SAM and a first scFv;
   [1356] U. A first dAb, a second dAb, the SAM, a third dAb and a fourth dAb;
   [1357] V. A first dAb, the Fc region, the SAM and a second dAb;
   [1358] W. A first dAb, the Fc region, the SAM and a first scFv;
   [1359] X. A first dAb, a second dAb, the Fc region and the SAM;
   [1360] Y. A first dAb, a second dAb, the Fc region, the SAM and a third dAb;
   [1361] Z. A first dAb, a second dAb, the Fc region, the SAM and a first scFv; or
   [1362] AA. A first dAb, a second dAb, the Fc region, the SAM, a third dAb and a fourth dAb.

[1363] Optionally, any single variable domain or dAb herein is a Nanobody™ or a Camelid VHH (eg, a humanised Camelid VHH). For example, a variable domain, such as a dAb (AKA antibody single variable domain) herein is a VH (eg, comprised by a scFv or a Fab polypeptide chain). In another example, it is a VHH (eg, comprised by a scFv or a Fab polypeptide chain). In another example, it is a humanised VH, humanised VHH or a human VH (eg, comprised by a scFv or a Fab polypeptide chain). In another example, it is a VL (eg, comprised by a scFv or a Fab polypeptide chain). In another example, it is a Vκ. In another example, it is a Vλ.

[1364] In an embodiment, each polypeptide of the multimer is paired with a copy of a further polypeptide, wherein the further polypeptide comprises an antibody light chain constant region (eg, a Cκ or a Cλ) that pairs with the Fc of the first polypeptide. In an example, the first polypeptide comprises an antibody VH domain, the further polypeptide comprises an antibody VL domain (eg, a Vκ or a Vλ), wherein the VH and VL form an epitope binding site. In this way, the multimer may be a multimer of Fab-like structures, such as comprising multiple copies of an adalimumab (Humira) or avelumab (Bavencio) binding site as exemplified in the Examples below. All of the antibody domains in such a multimer may, for example, be human, and optionally the SAM is a human domain. When the SAM is a TD (eg, a p53 TD), the multimer comprises a tetramer of the VH/VL epitope binding sites. The first polypeptide or the further polypetide may comprise a second epitope binding site, for example, wherein the multimer is octavalent. When the 8 binding sites may bind the same antigen; alternatively the 4 VH/VL binding sites bind a first antigen and the other 4 binding sites bind to a second antigen, wherein the antigens are different. Thus, the multimer may be octavalent and bispecific. If the first or further polypetide comprises yet another antigen binding site, the multimer may be 12-valent (and, eg, monospecific, bispecific or trispecific for antigen binding). If the first or further polypetide comprises yet another antigen binding site, the multimer may be 16-valent (and, eg, monospecific, bispecific, trispecific or tetraspecific for antigen binding).

[1365] The invention further provides:-
[1366] A multimer (optionally a tetramer) of a polypeptide according to the invention; optionally wherein the multimer is for medical use. In an example, the medical use herein is the treatment or prevention of a cancer, autoimmune disease or condition or any other disease or condition disclosed herein.
[1367] A multimer of a plurality of antibody Fc regions, wherein each Fc is comprised by a respective polypeptide and is unpaired with another Fc region; optionally wherein the multimer is for medical use. Optionally, each polypeptide comprises an epitope binding domain or site as disclosed herein.
[1368] A pharmaceutical composition comprising the polypeptide or multimer of the invention.
[1369] A nucleic acid encoding a polypeptide of the invention; optionally wherein the nucleic acid is comprised by a eukaryotic cell or a vector.
[1370] A method of binding multiple copies of an antigen, the method comprising combining the copies with a multimer of or the composition of the invention, wherein the copies are bound by polypeptides of the multimer, and optionally the method comprising isolating the multimer bound to the antigen copies. In an example, the multimer is contacted with a sample comprising the copies of the antigen and copies of the antigen are sequestered in the sample by binding to the multimer. For example, the multimer is administered to a human or animal patient (or an environment is exposed to the multimer) and antigen copies are sequestered in the human (eg, for said medical use), animal (eg, for said medical use) or environment. For example, the environment is comprised by a soil, water source, waterway or industrial fluid, eg, for environmental remediation, such as where the antigen is comprised by an environmental pollutant or contaminant. In an example, the method is for purifying the sample or for isolating antigen comprised by the sample.
[1371] A method of treating or reducing the risk of a disease or condition in a human or animal subject, the method comprising administering the composition of the invention to the subject, wherein multimers comprised by the composition specifically bind to a target antigen in the subject, wherein said binding mediates the treatment or reduction in risk of the disease or condition.
[1372] A method of producing a composition comprising a plurality of polypeptides according to the invention, wherein the SAM is a self-associating tetramerisation domain (TD), the method comprising providing eukaryotic host cells according to the invention, culturing the host cells, and allowing expression and secretion from the cells of tetramers of the polypeptides, and optionally isolating or purifying the tetramers.

### Paragraphs

[1373] The invention provides the following Paragraphs. The following Paragraphs are not to be interpreted as Claims. The Claims start after the Examples section.
[1374] 1. A polypeptide (optionally according any polypeptide herein) comprising
   [1375] (a) An antibody Fc region, wherein the Fc region comprises an antibody CH2 domain and an antibody CH3 domain; and
   [1376] (b) A self-associating multimerisation domain (SAM);
   wherein the CH2 is devoid of a core hinge CXXC amino acid sequence, wherein X is any amino acid.
[1377] 2. The polypeptide of Paragraph 1, wherein each amino acid X is selected from a P, R and S.
[1378] 3. The polypeptide of Paragraph 1 or 2, wherein the CH2 is devoid of a complete upper hinge sequence.
[1379] 4. The polypeptide of any preceding Paragraph, wherein the CH2 comprises
   [1380] (a) an APELLGGPSV amino acid sequence, or an PAPELLGGPSV amino acid sequence;
   [1381] (b) an APPVAGPSV amino acid sequence, or an PAPPVAGPSV amino acid sequence; or
   [1382] (c) an APEFLGGPSV amino acid sequence, or an PAPEFLGGPSV amino acid sequence.
[1383] 5. The polypeptide of any preceding Paragraph, wherein the CH2 and CH3 are
   [1384] (a) human IgG1 CH2 and CH3 domains;
   [1385] (b) human IgG2 CH2 and CH3 domains;
   [1386] (c) human IgG3 CH2 and CH3 domains; or
   [1387] (d) human IgG4 CH2 and CH3 domains.
[1388] 6. The polypeptide of Paragraph 5(a) or (b), wherein CH2 is devoid of a CPPC sequence; or the polypeptide of Paragraph 5(c) wherein the CH2 is devoid of a CPRC sequence; or the polypeptide of Paragraph 5(d) wherein the CH2 is devoid of a CPSC sequence.
[1389] 7. The polypeptide of any one of Paragraphs 1 to 4, wherein the CH2 comprises
   [1390] (a) an APELLGGPSV amino acid sequence;
   [1391] (b) an EPKSCDKTHT[P]APELLGGPSV amino acid sequence, wherein the bracketed P is optional;
   [1392] (c) an APPVAGPSV amino acid sequence;
   [1393] (d) an ERKCCVE[P]APPVAGPSV amino acid sequence, wherein the bracketed P is optional;
   [1394] (e) an ELKTPLGDTTHT[P]APELLGGPSV amino acid sequence, wherein the bracketed P is optional;
   [1395] (f) an EPKSCDTPPP[P]APELLGGPSV amino acid sequence, wherein the bracketed P is optional; or
   [1396] (g) an APEFLGGPSV amino acid sequence; or
   [1397] (h) an ESKYGPP[P]APEFLGGPSV amino acid sequence, wherein the bracketed P is optional.
[1398] 8. The polypeptide of any preceding Paragraph, wherein the CH2 is devoid of a sequence selected from CXXC disclosed herein and SEQ ID Nos: 180-182.
[1399] 9. The polypeptide of any preceding Paragraph, wherein the polypeptide comprises an antibody variable domain that is capable of specifically binding to a first epitope.
[1400] 10. The polypeptide of Paragraph 9, wherein the variable domain selected from an antibody single variable domain, a VH and a VL; or wherein the domain is comprised by an scFv.
[1401] 11. The polypeptide of any preceding Paragraph, wherein the Fc region is 3′ of the SAM.
[1402] 12. The polypeptide of Paragraph 9, 10 or 11, wherein
   [1403] (a) the variable domain is 5′ of the SAM and the Fc region is 3′ of the SAM;
   [1404] (b) the variable domain is 3′ of the SAM and the Fc region is 5′ of the SAM;
   [1405] (c) the variable domain and Fc are 5′ of the SAM; or
   [1406] (d) the variable domain and Fc are 3′ of the SAM.
[1407] 13. The polypeptide of Paragraph 12 comprising a second variable domain 5′ or 3′ of the SAM, wherein the second variable domain is capable of specifically binding to a second epitope, wherein the first and second epitopes are identical or different.
[1408] 14. The polypeptide of paragraph 13, wherein the epitopes are different epitopes of the same antigen, or are epitopes of different antigens.
[1409] 15. The polypeptide of Paragraph 13 or 14, wherein the second variable domain is selected from an antibody single variable domain, a VH and a VL; or wherein the domain is comprised by an scFv.
[1410] 16. The polypeptide of Paragraph 15, wherein the second variable domain is an antibody single variable domain or an antibody constant domain.
[1411] 17. The polypeptide of any preceding Paragraph, wherein the SAM is a self-associating tetramerisation domain (TD).
[1412] 18. The polypeptide of Paragraph 17, wherein the TD is a p53, p63 or p73 TD or a homologue or orthologue thereof; or wherein the TD is a NHR2 TD or a homologue or orthologue thereof.
[1413] 19. The polypeptide of Paragraph 17 or 18, wherein the TD comprises an amino acid sequence that is at least 80% identical to SEQ ID NO: 10 or 126.
[1414] 20. The polypeptide of any preceding Paragraph, comprising an antibody CH1 constant domain, optionally a CH1-CH2-CH3, wherein the CH2 and CH3 are comprised by said Fc region.
[1415] 21. The polypeptide of any preceding Paragraph, wherein the polypeptide (first polypeptide) comprises or consists of (in N- to C-terminal direction);
   [1416] A. A first antibody single variable domain (dAb), an optional linker and said SAM;
   [1417] B. A first antibody single variable domain, an optional linker, said SAM and a second antibody single variable domain;
   [1418] C. A first scFv, an optional linker and said SAM;
   [1419] D. A first scFv, an optional linker, said SAM and a second scFv;
   [1420] E. A first antibody single variable domain, an optional linker, said SAM and a first scFv;
   [1421] F. A first scFv, an optional linker, said SAM and a first antibody single variable domain;
   [1422] G. A first antibody variable domain, an optional first linker, a first antibody constant domain, a second optional linker and said SAM;
   [1423] H. Said SAM, an optional linker and a first antibody single variable domain;
   [1424] I. Said SAM, an optional linker and a first scFv;
   [1425] J. Said SAM, an optional linker, a first antibody constant domain, a second optional linker and a first antibody variable domain; or
   [1426] K. Said SAM, an optional linker, a first antibody variable domain, a second optional linker and a first antibody constant domain.
[1427] 22. The polypeptide of any of Paragraphs 1 to 20, wherein
   [1428] (i) the polypeptide comprises (in N- to C-terminal direction);
      [1429] A. A dAb and the self-associating multimersiation domain (SAM);
      [1430] B. A first dAb, the SAM and a second dAb;
      [1431] C. A first scFv and the SAM;
      [1432] D. A first scFv, the SAM and a second scFv;
      [1433] E. A first scFv, the SAM and a first dAb;
      [1434] F. A first dAb, the Fc region and the SAM;
      [1435] G. A first scFv, the Fc region and the SAM;
      [1436] H. A VH, a CH1, the Fc region and the SAM;
      [1437] I. A VL, a CL, the Fc region and the SAM;
      [1438] J. A dAb; the SAM and the Fc region;
      [1439] K. A scFv; the SAM and the Fc region;
      [1440] L. A VH, a CH1, the SAM and the Fc region;
      [1441] M. A VL, a CL, the SAM and the Fc region;
      [1442] N. A first dAb, a second dAb and the SAM;
      [1443] O. A VH, a CH1 and the SAM;
      [1444] P. A VL, a CL and the SAM;
      [1445] Q. A VH, a CH1, the SAM and a first dAb;
      [1446] R. A VL, a CL, the SAM and a first dAb;
      [1447] S. A first dAb, a second dAb, the SAM and a third dAb;
      [1448] T. A first dAb, a second dAb, the SAM and a first scFv;
      [1449] U. A first dAb, a second dAb, the SAM, a third dAb and a fourth dAb;
      [1450] V. A first dAb, the Fc region, the SAM and a second dAb;
      [1451] W. A first dAb, the Fc region, the SAM and a first scFv;
      [1452] X. A first dAb, a second dAb, the Fc region and the SAM;
      [1453] Y. A first dAb, a second dAb, the Fc region, the SAM and a third dAb;
      [1454] Z. A first dAb, a second dAb, the Fc region, the SAM and a first scFv; or
      [1455] AA. A first dAb, a second dAb, the Fc region, the SAM, a third dAb and a fourth dAb;
      Or
   [1456] (ii) the polypeptide comprises (in C- to N-terminal direction);
      [1457] A. A dAb and a self-associating multimersiation domain (SAM);
      [1458] B. A first dAb, the SAM and a second dAb;
      [1459] C. A first scFv and the SAM;
      [1460] D. A first scFv, the SAM and a second scFv;
      [1461] E. A first scFv, the SAM and a first dAb;
      [1462] F. A first dAb, the Fc region and the SAM;
      [1463] G. A first scFv, the Fc region and the SAM;
      [1464] H. A VH, a CH1, the Fc regionand the SAM;
      [1465] I. A VL, a CL, the Fc region and the SAM;
      [1466] J. A dAb; the SAM and the Fc region;
      [1467] K. A scFv; the SAM and the Fc region;
      [1468] L. A VH, a CH1, the SAM and the Fc region;
      [1469] M. A VL, a CL, the SAM and the Fc region;
      [1470] N. A first dAb, a second dAb and the SAM;
      [1471] O. A VH, a CH1 and the SAM;
      [1472] P. A VL, a CL and the SAM;
      [1473] Q. A VH, a CH1, the SAM and a first dAb;
      [1474] R. A VL, a CL, the SAM and a first dAb;
      [1475] S. A first dAb, a second dAb, the SAM and a third dAb;
      [1476] T. A first dAb, a second dAb, the SAM and a first scFv;
      [1477] U. A first dAb, a second dAb, the SAM, a third dAb and a fourth dAb;
      [1478] V. A first dAb, the Fc region, the SAM and a second dAb;
      [1479] W. A first dAb, the Fc region, the SAM and a first scFv;
      [1480] X. A first dAb, a second dAb, the Fc region and the SAM;
      [1481] Y. A first dAb, a second dAb, the Fc region, the SAM and a third dAb;
      [1482] Z. A first dAb, a second dAb, the Fc region, the SAM and a first scFv; or
      [1483] AA. A first dAb, a second dAb, the Fc region, the SAM, a third dAb and a fourth dAb.
[1484] 23. The polypeptide of Paragraph 21B, 21D, (i) 22B, (i) 22D, (i) 22N, (i) 22S, (i) 22T, (i) 22U, (i) 22X, (i) 22Y, (i) 22Z, (i) 22AA, (ii) 22B, (ii) 22D, (ii) 22N, (ii) 22S, (ii) 22T, (ii) 22U, (ii) 22X, (ii) 22Y, (ii) 22Z or (ii) 22AA wherein the single variable domains (dAbs) are identical; or wherein the scFvs are identical.
[1485] 24. The polypeptide of Paragraph 21B, 21D, (i) 22B, (i) 22D, (i) 22N, (i) 22S, (i) 22T, (i) 22U, (i) 22X, (i) 22Y, (i) 22Z, (i) 22AA, (ii) 22B, (ii) 22D, (ii) 22N, (ii) 22S, (ii) 22T, (ii) 22U, (ii) 22X, (ii) 22Y, (ii) 22Z or (ii) 22AA wherein the single variable domains are different; or wherein the scFvs are different.
[1486] 25. The polypeptide of Paragraph 21G, 21J, 21K, (i) 22H, (i) 22I, (i) 22L, (i) 22M, (i) 22O, (i) 22P, (i) 22Q, (i) 22R, (ii) 22H, (ii) 22I, (ii) 22L, (ii) 22M, (ii) 22O, (ii) 22P, (ii) 22Q or (ii) 22R wherein (i) the first variable domain is a VH domain and the first constant domain is a CH1 domain, and optionally the polypeptide is associated with a second polypeptide, wherein the second polypeptide comprises an antibody CL constant domain that is paired with the CH1 domain; (ii) the first variable domain is a VH domain and the first constant domain is a CL domain, and optionally the polypeptide is associated with a second polypeptide, wherein the second polypeptide comprises an antibody CH1 constant domain that is paired with the CL domain; (iii) the first variable domain is a VL domain and the first constant domain is a CH1 domain, and optionally the polypeptide is associated with a second polypeptide, wherein the second polypeptide comprises an antibody CL constant domain that is paired with the CH1 domain; or (iv) the first variable domain is a VL domain and the first constant domain is a CL domain, and optionally the polypeptide is associated with a second polypeptide, wherein the second polypeptide comprises an antibody CH1 constant domain that is paired with the CL domain.
[1487] 26. The polypeptide of any one of Paragraphs 21 to 25, comprising an antibody Fc region or antibody single variable domain between (v) the first variable domain or scFv and (vi) the SAM, wherein the Fc comprises a CH2 and a CH3.
[1488] 27. The polypeptide of any one of Paragraphs 21 to 26, comprising the Fc region or an antibody single variable domain between (i) the SAM and (ii) the most C-terminal variable domain.
[1489] 28. The polypeptide of any one of Paragraphs 21 to 27, comprising in N- to C-terminal direction the antibody Fc region and the most N-terminal variable domain or scFv.
[1490] 29. The polypeptide of any one of Paragraphs 21 to 28, comprising in N- to C-terminal direction the SAM and the antibody Fc region.
[1491] 30. The polypeptide of any one of Paragraphs 21 to 29, wherein the first or each linker is a (G₄S)ₙ linker, wherein n=1, 2, 3, 4, 5, 6, 7, 8, 9 or 10.
[1492] 31. The polypeptide of any preceding Paragraph, wherein each domain and SAM is a human domain and SAM respectively.
[1493] 32. The polypeptide of any preceding Paragraph, wherein the polypeptide comprises binding specificity for more than one antigen, optionally 2, 3 or 4 different antigens.
[1494] 33. A multimer (optionally a tetramer) of a polypeptide according to any preceding Paragraph.
[1495] 34. A multimer of a plurality of antibody Fc regions, wherein each Fc is comprised by a respective polypeptide and is unpaired with another Fc region.
[1496] 35. The multimer of Paragraph 34, wherein the multimer is a polypeptide tetramer comprising at least 4 Fc regions.
[1497] 36. The multimer of Paragraph 34 or 35, wherein each Fc region is identical.
[1498] 37. The multimer of any one of Paragraphs, wherein each Fc comprise a CH2 and a CH3, wherein each CH2 is a CH2 as recited in any one of Paragraphs 1 to 32.
[1499] 38. The polypeptide or multimer of any preceding Paragraph, comprising eukaryotic cell glycosylation.
[1500] 39. The polypeptide or multimer of Paragraph 38, wherein the cell is a HEK293, CHO or Cos cell.
[1501] 40. The polypeptide or multimer of any preceding Paragraph for medical use.
[1502] 41. A pharmaceutical composition comprising the polypeptide or multimer of any preceding Paragraph.
[1503] 42. A nucleic acid encoding a polypeptide of any one of Paragraphs 1 to 32 and 38 to 40.
[1504] 43. A eukaryotic cell or vector comprising the nucleic acid of Paragraph 42.
[1505] 44. A method of binding multiple copies of an antigen, the method comprising combining the copies with a multimer of any one of Paragraphs 33 to 40, wherein the copies are bound by polypeptides of the multimer, and optionally the method comprising isolating the multimer bound to the antigen copies.
[1506] 45. The method of Paragraph 37 wherein the method is a diagnostic method for detecting the presence of a substance in a sample, wherein the substance comprises the antigen, the method comprising providing the sample (eg, a bodily fluid, food, food ingredient, beverage, beverage ingredient, soil or forensic sample), mixing the sample with multimers according to any one of Paragraphs 33 to 40 and detecting the binding of multimers to the antigen in the sample.
[1507] 46. A method of treating or reducing the risk of a disease or condition in a human or animal subject, the method comprising administering the composition of Paragraph 41 to the subject, wherein multimers comprised by the composition specifically bind to a target antigen in the subject, wherein said binding mediates the treatment or reduction in risk.
[1508] 47. The method of Paragraph 46, wherein the antigen is an immune checkpoint antigen (eg, PD-L1, PD-1 or CTLA4); or wherein the antigen is TNF alpha or IL-17A.
[1509] 48. The method of Paragraph 46, wherein the antigen mediates the disease or condition in the subject; and optionally wherein the binding antagonises the antigen.
[1510] 49. A composition comprising a plurality of polypeptides according to any one of Paragraphs 1 to 32 and 38 to 40, wherein at least 90% of the polypeptides are comprised by tetramers of said polypeptides.
[1511] 50. The composition of Paragraph 49, wherein at least 98% of the polypeptides are comprised by tetramers of said polypeptides.
[1512] 51. The composition of Paragraph 49 or 50, wherein the remaining polypeptides are selected from one or more of polypeptide monomers, dimers and trimers.
[1513] 52. A method of producing a composition (optionally a composition according to any one of Paragraphs 49 to 51) comprising a plurality of polypeptides according to any one of Paragraphs 1 to 32 and 38 to 40, the method comprising providing eukaryotic host cells according to Paragraph 34, culturing the host cells, and allowing expression and secretion from the cells of tetramers of the polypeptides, and optionally isolating or purifying the tetramers.

### Concepts

[1514] In certain embodiments, the invention is useful for providing multimers for treating cancer in humans or animals. In this respect, it may be useful to use the multimers to target tumours by binding to tumour-associated antigen and/or to bind to T-cells to modulate their activity. For example the multimers may bind to an antigen on T regulatory cells (Tregs) to downregulate their activity. Additionally or alternatively, the multimers may bind to T effector (Teff) cells to upregulate their activity. The provision of an antibody Fc region in the polypeptides of multimers may be advantageous for providing Fc effector functions and/or cytotoxicity for killing tumour cells. In one advantageous configuration, the invention exploits the ability to provide multiple identical antigen or epitope binding sites that can be used to bind to several copies of the same antigen or epitope on tumour cells, thereby providing for an avidity affect wherein the multimers bind preferentially to tumour cells over any non-target or normal cells, since the former surface-express more copies of the antigen than normal cells. In one configuration, when the multimer also comprises binding sites for an immune checkpoint regulator. In one example the regulator is an immune checkpoint inhibitor and the binding sites antagonise the inhibitor. This is useful, for example when the inhibitor is expressed by Teff cells, for upregulating Teff activity in the vicinity of tumour cells that are targeted by the multimer (eg, by binding TAA on the tumour cells). In another example the regulator is an immune checkpoint stimulator and the binding sites agonise the inhibitor. This is useful, for example when the inhibitor is expressed by Teff cells, for upregulating Teff activity in the vicinity of tumour cells that are targeted by the multimer (eg, by binding TAA on the tumour cells). Thus, upregulation of T-cell activity may be stimulated in the vicinity of tumour cells, rather in the vicinity of non-target (eg, normal or non-cancerous) cells. To this end, the invention provides the following Concepts. The following Concepts are not to be interpreted as Claims. The Claims start after the Examples section.
[1515] 1. A polypeptide comprising a self-associating multimerisation domain (SAM), a first antigen binding site and a second antigen binding site, wherein the first site specifically binds to a first antigen or epitope, and the second binding site specifically binds to a second antigen or epitope, wherein each antigen or epitope is a tumour-associated antigen (TAA) or epitope, or an immune checkpoint regulator (eg, inhibitor) antigen or epitope.
[1516] 2. The polypeptide of Concept 1, wherein the first antigen is a TAA and the second antigen is an immune checkpoint regulator (eg, inhibitor).
[1517] 3. The polypeptide of Concept 1, wherein the first antigen is a TAA and the second antigen is a TAA.
[1518] 4. The polypeptide of Concept 1, wherein the first antigen is an immune checkpoint inhibitor and the second antigen is an immune checkpoint regulator (eg, inhibitor).
[1519] 5. The polypeptide of Concept 3 or 4, wherein the binding sites are capable of specifically binding to the same epitope of the same antigen.
[1520] 6. The polypeptide of Concept 3 or 4, wherein the binding sites are capable of specifically binding to different epitopes of the same antigen.
[1521] 7. The polypeptide of any preceding Concept, wherein the first antigen is selected from 4-1BB, 4-1BBL, CD28, OX40, OX40L, ICOS, ICOSL, GITR, CD40, CD27, CD27L, CD40L, LIGHT, CD70, CD80, CD86, HER2, HER3, PSMA, WT1, MUC1, LMP2, EGFRvIII, MAGE A3, GD2, CEA, Melan a/MART1, Bcr-Abl, Survivin, PSA, hTERT, EphA2, PAP, EpCAM, ERG, PAX3, ALK, Androgen receptor, Cyclin B1, RhoC, GD3, PSCA, PAX5, LCK, VEGFR2, MAD CT-1, FAP, MAD CT-2, PDGFR-beta, Fos related antigen 1, NY-BR-1, ETV6-AML, RGS5, SART3, SSX2, XAGE-1, STn, PAP and BCMA.
[1522] 8. The polypeptide of any preceding Concept, wherein the second antigen is selected from PDL1, PD1, CTLA4, BTLA, KIR, LAG3, TIM3, A2aR, HVEM, GAL9, VISTA, SIRPa, CD47, CD160, CD155, IDO, CEACAM1, 2B4, CD48 and TIGIT.
[1523] 9. The polypeptide of any preceding Concept, wherein the polypeptide comprises a third antigen binding site that is capable of specifically binding to a third antigen or epitope.
[1524] 10. The polypeptide of Concept 9, wherein the third antigen is a TAA.
[1525] 11. The polypeptide of Concept 9, wherein the third antigen is an immune checkpoint regulator (eg, inhibitor).
[1526] 12. The polypeptide of any one of Concepts 9 to 11, wherein the third antigen is the same as the first or second antigen.
[1527] 13. The polypeptide of any one of Concepts 9 to 12, wherein the third antigen is CD3 (eg, CD3e) or CD28.
[1528] 14. The polypeptide of any one of Concepts 9 to 13, wherein the polypeptide comprises a fourth antigen binding site that is capable of specifically binding to a fourth antigen or epitope.
[1529] 15. The polypeptide of Concept 14, wherein the fourth antigen is a TAA.
[1530] 16. The polypeptide of Concept 14, wherein the fourth antigen is an immune checkpoint regulator (eg, inhibitor).
[1531] 17. The polypeptide of any preceding Concept, wherein the polypeptide is according to any polypeptide disclosed herein.

[1532] In an example, said first dAb or first scFv of the polypeptide herein is the first antigen binding site of these Concepts; and optionally when a further dAb or scFv binding site is present this is the second antigen binding site of the Concepts.

[1533] In an example, said first dAb or first scFv of the polypeptide herein is the second antigen binding site of these Concepts; and optionally when a further dAb or scFv binding site is present this is the first antigen binding site of the Concepts.
[1534] 18. A multimer of a polypeptide of any preceding Concept.
[1535] 19. The multimer of Concept 18 for administration to a human or animal subject for targeting of an immune checkpoint inhibitor and an immune co-stimulatory molecule for the treatment of cancer.
[1536] 20. A method of treating a cancer in a human or animal subject, the method comprising administering the multimer of claim 18 to the subject.

### Clauses

[1537] In a configuration, the invention provides the following Clauses. The following Clauses are not to be interpreted as Claims. The Claims start after the Examples section.
[1538] 1. A protein multimer of at least first, second, third and fourth copies of an effector domain (eg, a protein domain) or a peptide, wherein the multimer is multimerised by first, second, third and fourth self-associating tetramerisation domains (TDs) which are associated together, wherein each tetramerisation domain is comprised by a respective engineered polypeptide comprising one or morecopies of said protein domain or peptide.
[1539] 2. The multimer of Clause 1, wherein the multimer is a tetramer, octamer, dodecamer, hexadecamer or 20-mer (eg, tetramer or an octamer) of said domain or peptide.
[1540] 3. The multimer of any Clause 1 or 2, comprising a tetramer, octamer, dodecamer, hexadecamer or 20-mer (eg, tetramer or an octamer) of an immunoglobulin superfamily binding site.
[1541] 4. The multimer of Clause 3, wherein the binding site comprises a first variable domain paired with a second variable domain.
[1542] 5. The multimer of any preceding Clause, wherein each polypeptide comprises first and second copies of said protein domain or peptide, wherein the polypeptide comprises in (N- to C-terminal direction) (i) a first of said copies - TD - the second of said copies; (ii) TD - and the first and second copies; or (iii) said first and second copies - TD.
[1543] 6. The multimer of any preceding Clause, wherein the TDs are NHR2 TDs and the domain or peptide is not a NHR2 domain or peptide; or wherein the TDs are p53 TDs and the domain or peptide is not a p53 domain or peptide.
[1544] 7. The multimer of any preceding Clause, wherein the engineered polypeptide comprises one or more copies of a second type of protein domain or peptide, wherein the second type of protein domain or peptide is different from the first protein domain or peptide.
[1545] 8. The multimer of any preceding Clause, wherein the domains are immunoglobulin superfamily domains.
[1546] 9. The multimer of any preceding Clause, wherein the domain or peptide is an antibody variable or constant domain, a TCR variable or constant domain, an incretin, an insulin peptide, or a hormone peptide.
[1547] 10. The multimer of any preceding Clause, wherein the multimer comprises first, second, third and fourth identical copies of a said engineered polypeptide, the polypeptide comprising a TD and one (but no more than one), two (but no more than two) or more copies of the said protein domain or peptide.
[1548] 11. The multimer of any preceding Clause, wherein the engineered polypeptide comprises an antibody or TCR variable domain (V1) and a NHR2 TD.
[1549] 12. The multimer of Clause 11, wherein the polypeptide comprises (in N- to C-terminal direction) (i) V1-an optional linker-NHR2 TD; (ii) V1-an optional linker-NHR2 TD-optional linker-V2; or (iii) V1-an optional linker-V2 - optional linker - NHR2 TD, wherein V1 and V2 are TCR variable domains and are the same or different, or wherein V1 and V2 are antibody variable domains and are the same or different.
[1550] 13. The multimer of Clause 12, wherein V1 and V2 are antibody single variable domains.
[1551] 14. The multimer of Clause 11, wherein each engineered polypeptide comprises (in N- to C-terminal direction) V1-an optional linker- TD, wherein V1 is an antibody or TCR variable domain and each engineered polypeptide is paired with a respective second engineered polypeptide that comprises V2, wherein V2 is a an antibody or TCR variable domain respectively that pairs with V1 to form an antigen or pMHC binding site, and optionally one polypeptide comprises an antibody Fc, or comprises antibody CH1 and the other polypeptide comprises an antibody CL that pairs with the CH1.
[1552] 15. The multimer of any preceding Clause, wherein the TD comprises (i) an amino acid sequence identical to SEQ ID NO: 10 or 126 or at least 80% identical thereto; or (ii) an amino acid sequence identical to SEQ ID NO: 120 or 123 or at least 80% identical thereto.
[1553] 16. The multimer of any preceding Clause, wherein the multimer comprises a tetramer, octamer, dodecamer, hexadecamer or 20-mer (eg, tetramer or an octamer) of an antigen binding site of an antibody selected from the group consisting of ReoPro™; Abciximab; Rituxan™; Rituximab; Zenapax™; Daclizumab; Simulect™; Basiliximab; Synagis™; Palivizumab; Remicade™; Infliximab; Herceptin™; Mylotarg™; Gemtuzumab; Campath™; Alemtuzumab; Zevalin™; Ibritumomab; Humira™; Adalimumab; Xolair™; Omalizumab; Bexxar™; Tositumomab; Raptiva™; Efalizumab; Erbitux™; Cetuximab; Avastin™; Bevacizumab; Tysabri™; Natalizumab; Actemra™; Tocilizumab; Vectibix™; Panitumumab; Lucentis™; Ranibizumab; Soliris™; Eculizumab; Cimzia™; Certolizumab; Simponi™; Golimumab, Ilaris™; Canakinumab; Stelara™; Ustekinumab; Arzerra™; Ofatumumab; Prolia™; Denosumab; Numax™; Motavizumab; ABThrax™; Raxibacumab; Benlysta™; Belimumab; Yervoy™; Ipilimumab; Adcetris™; Brentuximab; Vedotin™; Perjeta™; Pertuzumab; Kadcyla™; Ado-trastuzumab; Keytruda™, Opdivo™, Gazyva™ and Obinutuzumab.
[1554] 17. An isolated tetramer, octamer, dodecamer, hexadecamer or 20-mer of a TCR binding site, insulin peptide, incretin peptide or peptide hormone; or a plurality of said tetramers or octamers.
[1555] 18. The multimer, tetramer, octamer, dodecamer, hexadecamer or 20-mer (eg, tetramer or an octamer) of any preceding Clause, wherein the mulitmer, tetramer, octamer, dodecamer, hexadecamer or 20-mer is
   [1556] (a) soluble in aqueous solution;
   [1557] (b) secretable from a eukaryotic cell; and/or
   [1558] (c) an expression product of a eukaryotic cell.
[1559] 19. A tetramer, octamer, dodecamer, hexadecamer or 20-mer (eg, tetramer or an octamer) of
   [1560] (a) TCR V domains or TCR binding sites, wherein the tetramer, octamer, dodecamer, hexadecamer or 20-mer is soluble in aqueous solution;
   [1561] (b) antibody single variable domains, wherein the tetramer, octamer, dodecamer, hexadecamer or 20-mer is soluble in aqueous solution;
   [1562] (c) TCR V domains or TCR binding sites, wherein the tetramer, octamer, dodecamer, hexadecamer or 20-mer is capable of being intracellularly and/or extracellularly expressed by HEK293 cells; or
   [1563] (d) antibody variable domains, wherein the tetramer, octamer, dodecamer, hexadecamer or 20-mer is capable of being intracellularly and/or extracellularly expressed by HEK293 cells.
[1564] 20. The multimer, tetramer, octamer, dodecamer, hexadecamer or 20-mer of any preceding Clause, wherein the tetramer, octamer, dodecamer, hexadecamer or 20-mer is bi-specific for antigen or pMHC binding.
[1565] 21. The multimer, tetramer, octamer, dodecamer, hexadecamer or 20-mer of any preceding Clause, wherein the domains are identical.
[1566] 22. The multimer, tetramer, octamer, dodecamer, hexadecamer or 20-mer of any preceding Clause, wherein the multimer, tetramer, octamer, dodecamer, hexadecamer or 20-mer comprises eukaryotic cell glycosylation.
[1567] 23. The multimer, tetramer, octamer, dodecamer, hexadecamer or 20-mer of Clause 22, wherein the cell is a HEK293 cell.
[1568] 24. A plurality of multimers, tetramers, octamers, dodecamesr, hexadecamers or 20-mers (eg, tetramers or octamers) of any preceding Clause.
[1569] 25. A pharmaceutical composition comprising the multimer(s), tetramer(s), octamer(s), dodecamer(s), hexadecamer(s) or 20-mer(s) (eg, tetramer(s) or octamer(s)) of any preceding Clause and a pharmaceutically acceptable carrier, diluent or excipient.
[1570] 26. A cosmetic, foodstuff, beverage, cleaning product, detergent comprising the multimer(s), tetramer(s), octamer(s), dodecamer(s), hexadecamer(s) or 20-mer(s) (eg, tetramer(s) or octamer(s)) of any one of Clauses 1 to 24.
[1571] 27. A said engineered (and optionally isolated) polypeptide or a monomer (optionally isolated) of a multimer, tetramer, octamer, dodecamer, hexadecamer or 20-mer of any preceding Clause.
[1572] 28. An engineered (and optionally isolated) polypeptide (P1) which comprises (in N- to C-terminal direction):-
   [1573] (a) TCR V1 -TCR C1 - antibody CH1 - optional linker - TD, wherein
      [1574] (i) V1 is a Vα and C1 is a Cα;
      [1575] (ii) V1 is a Vβ and C1 is a Cβ;
      [1576] (iii) V1 is a Vγ and C1 is a Cγ; or
      [1577] (iv) V1 is a Vδ and C1 is a Cδ;
      or
   [1578] (b) TCR V1 - antibody CH1 optional linker - TD, wherein
      [1579] (i) V1 is a Vα;
      [1580] (ii) V1 is a Vβ;
      [1581] (iii) V1 is a Vγ; or
      [1582] (iv) V1 is a Vδ;
      or
   [1583] (c) antibody V1 - antibody CH1 optional linker - TD, wherein
      [1584] (i) V1 is a VH; or
      [1585] (ii) V1 is a VL;
      or
   [1586] (d) antibody V1 - optional antibody CH1 antibody Fc - optional linker - TD, wherein
      [1587] (i) V1 is a VH; or
      [1588] (ii) V1 is a VL;
      or
   [1589] (e) antibody V1 - antibody CL - optional linker - TD, wherein
      [1590] (i) V1 is a VH; or
      [1591] (ii) V1 is a VL;
      or
   [1592] (f) TCR V1 -TCR C1 - optional linker - TD, wherein
      [1593] (i) V1 is a Vα and C1 is a Cα;
      [1594] (ii) V1 is a Vβ and C1 is a Cβ;
      [1595] (iii) V1 is a Vγ and C1 is a Cγ; or
      [1596] (iv) V1 is a Vδ and C1 is a Cδ.
[1597] 29. The polypeptide of Clause 28, wherein the engineered polypeptide P1 is paired with a further polypeptide (P2), wherein P2 comprises (in N- to C-terminal direction):-
   [1598] (g) TCR V2 -TCR C2 - antibody CL, wherein P1 is according to (a) recited in Clause 28 and
      [1599] (i) V2 is a Vα and C2 is a Cα when P1 is according to (a)(ii);
      [1600] (ii) V2 is a Vβ and C2 is a Cβ when P1 is according to (a)(i);
      [1601] (iii) V2 is a Vγ and C2 is a Cγ when P1 is according to (a)(iv); or
      [1602] (iv) V2 is a Vδ and C2 is a Cδ when P1 is according to (a)(iii);
      or
   [1603] (h) TCR V2 - antibody CL, wherein P1 is according to (b) recited in Clause 28 and
      [1604] (i) V2 is a Vα when P1 is according to (b)(ii);
      [1605] (ii) V2 is a Vβ when P1 is according to (b)(i);
      [1606] (iii) V2 is a Vγ when P1 is according to (b)(iv); or
      [1607] (iv) V2 is a Vδ when P1 is according to (b)(iii);
      or
   [1608] (i) Antibody V2 - CL, wherein P1 is according to (c) recited in Clause 28 and
      [1609] (i) V2 is a VH when P1 is according to (c)(ii); or
      [1610] (ii) V2 is a VL when P1 is according to (c)(i);
      or
   [1611] (j) Antibody V2 - optional CL, wherein P1 is according to (d) recited in Clause 28 and
      [1612] (i) V2 is a VH when P1 is according to (d)(ii); or
      [1613] (ii) V2 is a VL when P1 is according to (d)(i);
      or
   [1614] (k) Antibody V2 - CH1, wherein P1 is according to (e) recited in Clause 28 and
      [1615] (i) V2 is a VH when P1 is according to (e)(ii); or
      [1616] (ii) V2 is a VL when P1 is according to (e)(i);
      or
   [1617] (1) TCR V2 -TCR C2, wherein Pis according to (f) recited in Clause 28 and
      [1618] (i) V2 is a Vα and C2 is a Cα when P1 is according to (f)(ii);
      [1619] (ii) V2 is a Vβ and C2 is a Cβ when P1 is according to (f)(i);
      [1620] (iii) V2 is a Vγ and C2 is a Cγ when P1 is according to (f)(iii); or
      [1621] (iv) V2 is a Vδ and C2 is a Cδ when P1 is according to (f)(iv).
[1622] 30. A multimer of P1 as defined in Clause 28; or of P1 paired with P2 as defined in Clause 29; or a plurality of said multimers, optionally wherein the multimer is according to any one of Clauses 1 to 24.
[1623] 31. A nucleic acid encoding an engineered polypeptide or monomer of any one of Clauses 27 to 29, optionally wherein the nucleic acid is comprised by an expression vector for expressing the polypeptide.
[1624] 32. A eukaryotic host cell comprising the nucleic acid or vector of Clause 31 for intracellular and/or secreted expression of the multimer, tetramer, octamer, dodecamer, hexadecamer or 20-mer (eg, tetramer, octamer), engineered polypeptide or monomer of any one of Clauses 1 to 24.
[1625] 33. Use of a nucleic acid or vector according to Clause 31 in a method of manufacture of protein multimers for producing intracellularly expressed and/or secreted multimers, wherein the method comprises expressing the multimers in and/or secreting the multimers from eukaryotic cells comprising the nucleic acid or vector.
[1626] 34. Use of a nucleic acid or vector according to Clause 31 in a method of manufacture of protein multimers for producing glycosylated multimers in eukaryotic cells comprising the nucleic acid or vector.
[1627] 35. A mixture comprising (i) a eukaryotic cell line encoding an engineered polypeptide according to any one of Clauses 27 to 29; and (ii) multimers, tetramers, octamers, dodecamers, hexadecamers or 20-mers (eg, tetramers or octamers)as defined in any one of Clauses 1 to 24.
[1628] 36. The mixture of Clause 35, wherein the cell line is in a medium comprising secretion products of the cells, wherein the secretion products comprise said multimers, tetramers, octamers, dodecamers, hexadecamers or 20-mers (eg, tetramers or octamers).
[1629] 37. The multimer, tetramer, octamer, dodecamer, hexadecamer or 20-mer (eg, tetramer, octamer) of any one of Clauses 1 to 24 for medical use.
[1630] 38. A method producing
   [1631] (a) TCR V domain multimers, the method comprising the soluble and/or intracellular expression of TCR V-NHR2 TD or TCR V- p53 TD fusion proteins expressed in eukaryotic cells, the method optionally comprising isolating a plurality of said multimers;
   [1632] (b) antibody V domain multimers, the method comprising the soluble and/or intracellular expression of antibody V -NHR2 TD or V- p53 TD fusion proteins expressed in eukaryotic cells, the method optionally comprising isolating a plurality of said multimers;
   [1633] (c) incretin peptide multimers, the method comprising the soluble and/or intracellular expression of incretin peptide-NHR2 TD or incretin peptide-p53 TD fusion proteins expressed in eukaryotic cells, such as HEK293T cells; the method optionally comprising isolating a plurality of said multimers; or
   [1634] (d) peptide hormone multimers, the method comprising the soluble and/or intracellular expression of peptide hormone-NHR2 TD or peptide hormone- p53 TD fusion proteins expressed in eukaryotic cells, such as HEK293T cells; the method optionally comprising isolating a plurality of said multimers.
[1635] 39. Use of self-associating tetramerisation domains (TD) in a method of the manufacture of a tetramer of polypeptides, for producing a higher yield of tetramers versus monomer and/or dimer polypeptides.
[1636] 40. Use of an engineered polypeptide in a method of the manufacture of a tetramer of a polypeptide comprising multiple copies of a protein domain or peptide, for producing a higher yield of tetramers versus monomer and/or dimer polypeptides, wherein the engineered polypeptide comprises one or more copies of said protein domain or peptide and further comprises a self-associating tetramerisation domains (TD).
[1637] 41. Use of self-associating tetramerisation domains (TD) in a method of the manufacture of a tetramer of a polypeptide, for producing a plurality of tetramers that are not in mixture with monomers, dimers or trimers.
[1638] 42. Use of an engineered polypeptide in a method of the manufacture of a tetramer of a polypeptide comprising multiple copies of a protein domain or peptide, for producing a plurality of tetramers that are not in mixture with monomers, dimers or trimers, wherein the engineered polypeptide comprises one or more copies of said protein domain or peptide and further comprises a self-associating tetramerisation domains (TD).
[1639] 43. The use of any one of Clauses 39 to 42, wherein the yield of tetramers is at least 10x the yield of monomers and/or dimers.
[1640] 44. The use of any one of Clauses 39 to 43, wherein the ratio of tetramers produced : monomers and/or dimers produced in the method is at least 90:10.
[1641] 45. The use of any one of Clauses 39 to 44, wherein each monomer has a size of no more than 40 kDa.
[1642] 46. The use of any one of Clauses 39 to 45, wherein each tetramer has a size of no more than 150 kDa.
[1643] 47. The use of any one of Clauses 39 to 46, wherein the method comprises expressing the tetramers from a eukaryotic cell line.
[1644] 48. A multivalent heterodimeric soluble T cell receptor capable of binding pMHC complex comprising:
   [1645] (a) TCR extracellular domains;
   [1646] (b) immunoglobulin constant domains; and
   [1647] (c) an NHR2 multimerisation domain of ETO.
[1648] 49. A multimeric immunoglobulin, comprising
   [1649] (i) immunoglobulin variable domains; and
   [1650] (ii) an NHR2 multimerisation domain of ETO.
[1651] 50. A method for assembling a soluble, multimeric polypeptide, comprising:
   [1652] (a) providing a monomer of the said multimeric polypeptide, fused to an NHR2 domain of ETO; and
   [1653] (b) causing multiple copies of said monomer to associate, thereby obtaining a multimeric, soluble polypeptide.

[1654] In any disclosure herein, the or each constant region or domain, the CH2, the CH3, the CH2 and CH3 or the Fc is respectively a constant region or domain, the CH2, the CH3, the CH2 and CH3 or the Fc of a human constant region. For example, the constant region is selected from the group IGHA1*01, IGHA1*02, IGHA1*03, IGHA2*01, IGHA2*02, IGHA2*03, IGHD*01, IGHD*02, IGHE*01, IGHE*02, IGHE*03, IGHE*04, IGHEP1*01, IGHEP1*02, IGHEP1*03, IGHEP1*04, IGHG1*01, IGHG1*02, IGHG1*03, IGHG1*04, IGHG1*05, IGHG1*06, IGHG1*07, IGHG1*08, IGHG1*09, IGHG1*10, IGHG1*11, IGHG1*12, IGHG1*13, IGHG1*14, IGHG2*01, IGHG2*02, IGHG2*03, IGHG2*04, IGHG2*05, IGHG2*06, IGHG2*07, IGHG2*08, IGHG2*09, IGHG2* 10, IGHG2* 11, IGHG2* 12, IGHG2* 13, IGHG2* 14, IGHG2* 15, IGHG2* 16, IGHG2* 17, IGHG3*01, IGHG3*02, IGHG3*03, IGHG3*04, IGHG3*05, IGHG3*06, IGHG3*07, IGHG3*08, IGHG3*09, IGHG3* 10, IGHG3* 11, IGHG3* 12, IGHG3* 13, IGHG3* 14, IGHG3* 15, IGHG3* 16, IGHG3 * 17, IGHG3* 18, IGHG3* 19, IGHG3*20, IGHG3*21, IGHG3*22, IGHG3*23, IGHG3*24, IGHG3*25, IGHG3*26, IGHG3*27, IGHG3*28, IGHG3*29, IGHG4*01, IGHG4*02, IGHG4*03, IGHG4*04, IGHG4*05, IGHG4*06, IGHG4*07, IGHG4*08, IGHGP*01, IGHGP*02, IGHGP*03, IGHM*01, IGHM*02, IGHM*03 and IGHM*04 (eg, the constant region is a *01 allele listed in said group, preferably the constant region is a human IGHG1*01 or IGHM*01 constant region). In an alternative, the constant region is a non-human (eg, mammal, rodent, mouse, rat, dog, cat or horse) constant region, such as a homologue of a human constant region listed in said group.

[1655] The polypeptide, in one embodiment, comprises (in N- to C-terminal direction) a first antigen binding site (eg, a dAb), an antibody CH1 (eg, human IgGl CH1), a hinge sequence comprising a lower hinge and devoid of a core hinge region (and optionally devoid of an upper hinge region), an antibody Fc region and a SAM (eg, a TD, such as a p53 TD). For example, the core hinge region sequence is a CXXC amino acid sequence. The polypeptide may comprise another antigen binding site (eg a dAb or scFv) between the first binding site and the CH1, between the Fc and SAM and/or C-terminal to the SAM. Optionally, the multimer comprises a plurality (eg, 4 copies) of such polypeptide, for example wherein each polypeptide is paired with a further polypeptide comprising (in N- to C-terminal direction) a second antigen binding site (eg, a dAb), an antibody CL (eg, a human Cκ) and optionally a third antigen binding site. Optionally the binding sites have the same antigen specificity (eg, all bind TNF alpha). In another option, the first and second (and optionally said another binding site) bind to different antigens. The or each binding site can bind any antigen disclosed herein, eg, each binding site binds TNF alpha (as shown in Example 17). In another example, the first antigen binding site is a VH of an antigen binding site of a predetermined antibody that specifically binds to the antigen (and the CH1 is optionally the CH1 of the antibody), and the second binding site of the further polypeptide is a VL of the antigen binding site of the predetermined antibody (and the CL is optionally the CL of the antibody), wherein the VH and VL pair to form a VH/VL binding site which has binding specificity for the antigen. The predetermined antibody may be a marketed antibody, for example, as shown in Example 19. For example, the VH/VL binding site specifically binds to CTLA-4, eg, wherein the predetermined antibody is ipilimumab (or Yervoy™). For example, the VH/VL binding site specifically binds to TNF alpha, eg, wherein the predetermined antibody is adalimumab, golimumab, infliximab (or Humira™, Simponi™ or Remicade™). For example, the VH/VL binding site specifically binds to PD-L1, eg, wherein the predetermined antibody is avelumab (or Bavencio™) or atezolizumab (or Tecentriq™). For example, the VH/VL binding site specifically binds to PD-1, eg, wherein the predetermined antibody is nivolumab (or Opdivo™) or pembrolizumab (or Keytruda™). For example, the VH/VL binding site specifically binds to VEGF, eg, wherein the predetermined antibody is bevacizumab (or Avastin™) or ranibizumab (or Lucentis™). In another example, the polypeptide comprises (in N- to C-terminal direction) a first VEGF binding site, an optional second VEGF binding site, an antibody CH1 (eg, human IgGl CH1), a hinge sequence comprising a lower hinge and devoid of a core hinge region (and optionally devoid of an upper hinge region), an antibody Fc region and a SAM (eg, a TD, such as a p53 TD). In an example, the first binding site is a Ig domain 2 from VEGFR1 and the second binding site is Ig domain 3 from VEGFR2 (as shown in Example 20). In another example, the first binding site is a Ig domain 3 from VEGFR2 and the second binding site is Ig domain 2 from VEGFR2. In an example, the first and second binding domains are (in N- to C-terminal direction) the first and second VEGF binding sites of aflibercept (or Eylea™).

[1656] Suitable predetermined antibodies are ReoPro™; Abciximab; Rituxanh™; Rituximab; Zenapaxh™; Daclizumab; Simulecth™; Basiliximab; Synagis™; Palivizumab; Remicadeh™; Infliximab; Herceptinh™; Trastuzumab; Mylotargh™; Gemtuzumab; Campathh™; Alemtuzumab; Zevalinh™; Ibritumomab; Humirah™; Adalimumab; Xolair™; Omalizumab; Bexxarh™; Tositumomab; Raptivah™; Efalizumab; Erbituxh™; Cetuximab; Avastinh™; Bevacizumab; Tysabrih™; Natalizumab; Actemrah™; Tocilizumab; Vectibixh™; Panitumumab; Lucentish™; Ranibizumab; Solirish™; Eculizumab; Cimziah™; Certolizumab; Simponih™; Golimumab, Ilaris™; Canakinumab; Stelara™; Ustekinumab; Arzerrah™; Ofatumumab; Prolie™; Denosumab; Numaxh™; Motavizumab; ABThraxh™; Raxibacumab; Benlystah™; Belimumab; Yervoyh™; Ipilimumab; Adcetrish™; Brentuximab; Vedotin™; Perjeta™; Pertuzumab; Kadcyla™; Ado-trastuzumab; Gazyva™ and Obinutuzumab. Also disclosed are the generic versions of these and the corresponding INN names - each of which is a suitable predetermined antibody for use as a source of antigen binding sites for use in the present invention. Suitable sequences of VH and VL domains of predetermined antibodies are disclosed in Table 4. Thus, for example, the multimer of the invention comprises a plurality (eg, 4, 8, 12, 16 or 20) copies of the VH/VL antigen binding site of any of these antibodies, eg, wherein the VH of the binding site is comprised by a polypeptide of the invention that comprises a SAM (eg, a TD) and each polypeptide is paired with a further polypeptide comprising the VL that pairs with the VH, thus forming an antigen binding site. In an example, the polypeptide comprising the SAM also comprises a CH1 which pairs with a CL of the further polypeptide. Optionally, the binding site of the polypeptide of the multimer comprises a VH of the binding site of the antibody and also the CH1 of the antibody (ie, in N- to C-terminal direction the VH-CH1 and SAM). In an embodiment, the polypeptide may be paired with a further polypeptide comprising (in N- to C-terminal direction a VL-CL, eg, wherein the CL is the CL of the antibody).

[1657] In one embodiment, the predetermined antibody is Avastin.

[1658] In one embodiment, the predetermined antibody is Actemra.

[1659] In one embodiment, the predetermined antibody is Erbitux.

[1660] In one embodiment, the predetermined antibody is Lucentis.

[1661] In one embodiment, the predetermined antibody is sarilumab.

[1662] In one embodiment, the predetermined antibody is dupilumab.

[1663] In one embodiment, the predetermined antibody is alirocumab.

[1664] In one embodiment, the predetermined antibody is evolocumab.

[1665] In one embodiment, the predetermined antibody is pembrolizumab.

[1666] In one embodiment, the predetermined antibody is nivolumab.

[1667] In one embodiment, the predetermined antibody is ipilimumab.

[1668] In one embodiment, the predetermined antibody is remicade.

[1669] In one embodiment, the predetermined antibody is golimumab.

[1670] In one embodiment, the predetermined antibody is ofatumumab.

[1671] In one embodiment, the predetermined antibody is Benlysta.

[1672] In one embodiment, the predetermined antibody is Campath.

[1673] In one embodiment, the predetermined antibody is rituximab.

[1674] In one embodiment, the predetermined antibody is Herceptin.

[1675] In one embodiment, the predetermined antibody is durvalumab.

[1676] In one embodiment, the predetermined antibody is daratumumab.

[1677] In another embodiment, the polypeptide comprises (in N- to C-terminal direction) a first antigen binding site, an optional linker (eg, a G₄Sₙ, wherein n=1, 2, 3, 4, 5, 6, 7, ot 8, preferably 3), a second antigen binding site, a hinge sequence comprising a lower hinge and devoid of a core hinge region (and optionally devoid of an upper hinge region), an antibody Fc (eg, an IgGl Fc) and a SAM (eg, a TD, such as a p53 TD). For example, the core hinge region sequence is a CXXC amino acid sequence. The polypeptide may comprise another antigen binding site (eg a dAb or scFv) between the Fc and SAM and/or C-terminal to the SAM. Optionally, the multimer comprises a plurality (eg, 4 copies) of such polypeptide. Optionally the binding sites have the same antigen specificity (eg, all bind TNF alpha). In another option, the first and second (and optionally said another binding site) bind to different antigens. The or each binding site can bind any antigen disclosed herein, eg, each binding site binds PD-L1, or the first binding site binds PD-L1 and the second binding site binds 41-BB, or the first binding site binds 4-1BB and the second binding site binds PD-L1 (as shown in Example 18).

[1678] The polypeptide, in one embodiment, comprises (in N- to C-terminal direction) a first antigen binding site (eg, a dAb), an optional linker (eg, a G₄Sₙ, wherein n=1, 2, 3, 4, 5, 6, 7, ot 8, preferably 3), a second antigen binding site (eg, a dAb), an antibody CH1 (eg, human IgGl CH1) and a SAM (eg, a TD, such as a p53 TD). The polypeptide may comprise another antigen binding site (eg a dAb or scFv) C-terminal to the SAM. Optionally, the multimer comprises a plurality (eg, 4 copies) of such polypeptide, for example wherein each polypeptide is paired with a further polypeptide comprising (in N- to C-terminal direction) a third antigen binding site (eg, a dAb), an optionaly fourth antigen binding site (eg, a dAb), an antibody CL (eg, a human Cκ or Cλ) and optionally a furhter antigen binding site. For example, the fourth and further binding sites are omitted. In another example, the third and fourth binding sites, but not the further binding site, are present. In another example, the third and further (but not the fourth) binding sites are present. Optionally the binding sites have the same antigen specificity (eg, all bind TNF alpha). In another option, the first and second (and optionally said another said binding site) bind to different antigens. The or each binding site can bind any antigen disclosed herein, eg, each binding site binds TNF alpha (as shown in Examples 21 and 22). In an example, the first and third, or the second and third binding sites pair to form a VH/VL pair that is identical to the VH/VL binding site of an anti-TNF alpha antibody, such as adalimumab, golimumab, infliximab (or Humira™, Simponi™ or Remicade™). In an example, the first and third, or the second and third binding sites pair to form a VH/VL pair that is identical to the VH/VL binding site of an anti-PD-L1 antibody, such as avelumab (or Bavencio™) or atezolizumab (or Tecentriq™). In an example, the first and third, or the second and third binding sites pair to form a VH/VL pair that is identical to the VH/VL binding site of an anti-PD-1 antibody, such as nivolumab (or Opdivo™) or pembrolizumab (or Keytruda™). In an example, the first and third, or the second and third binding sites pair to form a VH/VL pair that is identical to the VH/VL binding site of an anti-VEGF antibody, such as bevacizumab (or Avastin™) or ranibizumab (or Lucentis™). Predetermined antibodies as discussed above can be used as the source of the VH/VL pairs.

[1679] In an example, the polypeptide of the invention is any Quad polypeptide disclosed herein, eg, comprising the Quad amino acid shown in any of the Tables herein (eg, any one of SEQ ID Nos: 81-115, 151-162, 190, 191, 209-224 and 179) or encoded by any of the Quad nucleotide sequences in any of the Tables herein (eg, Table 9, 14 or 17), or having the structure of a polypeptide shown in Table 8. The SAM may be any SAM disclosed herein, eg, any p53 or homologue TD disclosed in any Table herein (eg, as shown in Table 7 or comprised by a protein in Table 13).

[1680] Where amino acid sequences are shown with plural histidines at their C-terminus (eg, “HHHHHH” optionally followed by “..AAA”), such histidines and the optional ..AAA are in one embodiment omitted and the corresponding nucleotides encoding this are omitted from the nucleic acid encoding the amino acid sequence. Where amino acid sequences are shown with a DYKDDDDK motif (eg, a DYKDDDDKHHHHHH or DYKDDDDKHHHHHH..AAA), such a motif is in one embodiment omitted and the corresponding nucleotides encoding this are omitted from the nucleic acid encoding the amino acid sequence.

### Further Configurations

[1681] As discussed herein, the invention provides configurations in which the polypeptide a self-associating multimerisation domain (SAM, eg, a TD) and a peptide, domain or an epitope or antigen binding site (eg, a dAb or an antibody variable domain). In an embodiment, the SAM is a TD, such a p53 TD as disclosed herein.

### Anti-Virus Examples, Surprising Expansion of Antigen Specificity Etc

[1682] In an example, the polypeptide comprises (eg, in N- to C-terminal direction) at least an extracellular domain (ECD) of a cell-surface protein that is a receptor for a virus or required for virus activation. For example, the protein poteolytically cleaves and activates a spike glycoprotein of the virus (eg, Coronoavirus or any other virus disclosed herein, such as in Table 19). Optionally, the entire cell-surface portion of the receptor is comprised by the polypeptide of the invention. In an example, the virus is capable of infecting human cells and the receptor is a cell-surface protein found on human cells (such as lung cells). In an example, the virus is capable of infecting non-human animal cells and the receptor is a cell-surface protein found on cells of such animal (such as lung cells). In an example, the virus is capable of infecting plant cells and the receptor is a cell-surface protein found on cells of such plant (such as a crop, wheat, corn, barley, tobacco, grass, fruiting plant or tree). By forming multimers using copies of the polypeptide according to the invention, multimers of the invention comprising copies of all or portions of such cell-surface proteins may act as sinks for binding several virus particles per copy of multimer. Advantageously, this will prevent the bound viruses from infecting cells of the human, animal, plant or other subject or environment in which the cells are present. So, for example, the invention provides a method of treating a viral infection in a human or animal subject, the method comprising administering a composition comprising a plurality of the multimers to a human or animal subject (eg, intravenously or by inhalation), wherein the subject is suffering from a virus infection and copies of the multimer bind to copies of the virus, thereby reducing the severity of the infection and/or reducing progression of the infection and/or reducing one or more symptoms of the infection (such as a inflammatory response). In another example, the composition can be used prophylactically; thus the invention provides a method of preventing or reducing the risk of a viral infection or a symptom thereof in a human or animal subject, the method comprising administering a composition comprising a plurality of the multimers to a human or animal subject (eg, intravenously or by inhalation), wherein the subject is at risk of suffering from a virus infection, thereby preventing or reducing the risk of the viral infection and/or preventing or reducing one or more symptoms of the infection (such as a inflammatory response). In an example, the virus is a Coronavirus.

[1683] In an example, the virus is a virus selected from Table 19.

[1684] For example, the virus is a Coronavirus, a MERS-Cov, a SARS-Cov, SARS-Cov-1 or preferably SARS-Cov-2. In this example, the receptor may be ACE2. In an alternative, the cell-surface protein is a TMPRSS protein, preferably a TMPRSS2 protein. Optionally, the polypeptide of the invention in this example comprises an ACE2 extracellular domain and a TMPRSS protein extracellular domain, optionally wherein the domains are human domains and the polypeptides (or multimers according to the invention comprising copies of such a polypeptide) are for treating or preventing a Coronavirus infection in a human. In an embodiment in this example, the SAM is a TD, such a p53 TD as disclosed herein.

[1685] An example of a protein required for virus activation is TMPRSS2 protein, eg, human TMPRSS2 protein (UniProtKB - 015393 (TMPS2 _HUMAN), the sequence with of which with identifier 015393-1 is explicitly incorporated herein for use in the invention and possible inclusion in one or more claims herein). In an example, the polypeptide of the invention comprises amino acids of human TMPRSS2 protein from amino acid 106 to 492.

[1686] In an alternative, the virus is selected from Coronavirus 229E (HCoV-229E), Coronavirus EMC (HCoV-EMC), Sendai virus (SeV), human metapneumovirus (HMPV), human parainfluenza 1, 2, 3, 4a and 4b viruses (HPIV), and influenza A virus (eg, strains H1N1, H3N2 and H7N9).

[1687] In an embodiment, the polypeptide comprises an angiotensin converting enzyme 2 (ACE2) protein as disclosed in any of US9,561,263; US 8,586,319; or EP2089715, EP2047867, EP2108695, EP2543724, EP2155871, EP2274005, EP3375872, EP2222330, EP2943216, EP2332582 or any US counterpart patent application or patent of any of these that shares a common priority. The disclosures of such proteins and their sequences as disclosed in these European and US patents and applications are explicitly incorporated herein for possible use in the invention, such as in polypepides or multimers of the invention. For example, the peptide or domain of the polypeptide of the invention comprises an ECD of entire ACE2 protein as disclosed in any one of these European and US patents and applications. Each such protein and sequence is also individually and explicitly incorporated herein such that any one of such proteins or sequences can be included in any claim herein as a component of a polypeptide or multimer of the invention. Also explicitly incorporated herein are the uses and medical diseases and conditions disclosed in any of such European and US patents and applications and the polypeptide or multimer or method or use of the present invention may be for treating, preventing or reducing the risk of any of such diseases or conditions and may be included in any claim herein.

[1688] As discussed, a polypeptide of the invention may comprises amino acid sequence from an ACE2 protein. In an embodiment, there is provided a polypeptide comprising an amino acid sequence selected from SEQ ID NOs: 229-231. In an embodiment, there is provided a polypeptide comprising an amino acid sequence selected from SEQ ID NOs: 229-231 with the exception that the polypeptide comprises an alternative SAM other than the p53 TD disclosed in such sequence. For example, the SAM is a p63, p73 or homologue TD as disclosed herein. In an embodiment, there is provided a polypeptide comprising an ACE2 amino acid sequence as comprised by any one of SEQ ID NOs: 229-231. The invention also provides a tetramer of the invention comprising 4 copies of such a polypeptide, as well as a composition of the invention comprising such a tetramer. Such a multimer or composition may preferably be for use in a method of treating, preventing or reducing the risk of a viral infection (eg, a Coronavirus, or preferably SARS-Cov-2 infection), hypertension or a lung condition (eg, an acute lung injury or inflammation) in a human.

[1689] For example, a polypeptide of the invention (eg, for treating or preventing a viral infection, preferably a Coronavirus, a MERS-Cov, a SARS-Cov, SARS-Cov-1 or SARS-Cov-2 infection) comprises the amino acid sequence from amino acid 18 to 615; or from 18 to 656 of SEQ ID NO: 1 disclosed in US9,561,263, which sequences are explicitly incorporated herein by reference for use in the present invention and for possible inclusion in one or more claims herein. Optionally, the polypeptide comprises the amino acid sequence from amino acid 18 to 615; or from 18 to 656; or from 18 to 740 of SEQ ID NO: 1 disclosed in US9,561,263, but does not comprise any other amino acids from such SEQ ID NO: 1. Optionally, the polypeptide comprises the amino acid sequence of SEQ ID NO: 2 disclosed in EP2332582, or an amino acid sequence that is at least 80, 85, 90, 95, 96, 97, 98 or 99% homologous thereto, which sequences are explicitly and individually incorporated herein by reference for use in the invention and possible inclusion in one or more claims herein. Optionally, N-glycosylation sites of Asn53, Asn90, Asn103, Asn322, Asn432, Asn546 and Asn690 of SEQ ID NO: 1 are sialyzed, eg, as disclosed in US8,568,319, which disclosure of sialyzation is explicitly incorporated herein for use in the invention.

[1690] In an alternative to treating, preventing or reducing the risk of a viral infection as discussed above, the invention instead provides polypeptides, multimers, methods and uses for treating, preventing or reducing the risk of inflammation in the subject (eg, in a human suffering from lung inflammation or at risk of such).

[1691] In an alternative to treating, preventing or reducing the risk of a viral infection as discussed above, the invention instead provides polypeptides, multimers, methods and uses for treating, preventing or reducing the risk of hypertension, heart failure (eg, congestive heart failure or chronic heart failure or acute heart failure), myocardial infarction, atherosclerosis, renal failure or insufficiency, polycystic kidney disease (PKD), or a pulmonary disease. Examples are disclosed in EP2543724, the disclosure of which are explicitly incorporated herein for use in the invention.

[1692] In an alternative to treating, preventing or reducing the risk of a viral infection as discussed above, the invention instead provides polypeptides, multimers, methods and uses for treating, preventing or reducing the risk of an acute lung injury (ALI), eg, ARDS (Adult Respiratory Distress Syndrome), SARS (Severe Acute Respiratory Syndrome) or MERS (Middle East Respiratory Syndrome).

[1693] Optionally, the polypeptide of the invention comprises eukaryotic cell, mammalian or human cell glycosylation eg, CHO or HEK293 or Cos cell glycosylation.

[1694] Optionally, the invention provides a composition (eg, for medical use as described herein, such as for treating, preventing or reducing the risk of a viral infection) comprising a plurality of polypeptides of the invention, wherein less than 15, 10, 5, 4, 3, 2, or 1% of all the polypeptides are comprised by the group consisting of polypeptide monomers, dimers and trimers. Additionally or alternatively, at least 80, 85, 90, 95, 96, 97, 98 or 99% of all of the polypeptides are comprised by multimers comprising 4 copies of the SAM (eg, p53 TD).

[1695] In an alternative to treating, preventing or reducing the risk of a viral infection as discussed above, the invention instead provides polypeptides, multimers, methods and uses for treating, preventing or reducing the risk of hypertension in the subject (eg, in a human suffering from a lung or cardiovascular condition or at risk of such).

[1696] In a configuration, the polypeptide of the invention comprises one or more binding sites for an antigen comprised by the extracellular part of a cell-surface protein that is a receptor (eg, ACE2 or a homologue or orthologue) for a virus or a protein (eg, TMPRSS2 protein) required for virus activation. In an embodiment, 1, 2, 3, 4 or 5 such binding sites are comprised by the polypeptide or by a multimer of the invention comprising copies of the polypeptide. In an example, each binding site is comprised by a dAb, Fv or scFv. In an example, the multimer comprises a plurality (eg, 4 and no more and no less than 4) copies of a polypepide of the invention comprising a SAM (eg, a TD) and each polypeptide as paired with a respective copy of a further polypeptide, wherein each polypeptide pair comprises a VH/VL antigen binding site. In an example, the binding site specifically binds to a spike glycoprotein of the virus, eg, any virus disclosed herein, preferably a Coronavirus, more preferably SARS-Cov-2. In an example, the binding site binds to 2 or more different Coronaviruses, eg, SARS-Cov-1 and 2. Advantageously, multimers comprising 4 (and no more or less than 4) copies of a heavy chain polypeptide comprising an amino acid sequence selected from SEQ ID NOs: 225-227, wherein each copy is paired with a copy of a polypeptide comprising the amino acid of SEQ ID NO: 228 will bind to a virus, such as a Coronavirus (eg, SAR-Cov-1 and/or SARS-Cov-2) and preferably SAR-Cov-1 and SARS-Cov-2. In an example, the binding site is a VH/VL antigen binding site of a SAR-Cov antibody, such as antibody CR3022, CR3006, CR3013 or CR3014 disclosed in PLoS Med. 2006 Jul;3(7):e237; “Human monoclonal antibody combination against SARS coronavirus: synergy and coverage of escape mutants”, ter Meulen J et al and J Virol. 2005 Feb; 79(3): 1635-1644; doi: 10.1128/JVI.79.3.1635-1644.2005; PMCID: PMC544131; PMID: 15650189, “Molecular and Biological Characterization of Human Monoclonal Antibodies Binding to the Spike and Nucleocapsid Proteins of Severe Acute Respiratory Syndrome Coronavirus”, Edward N. van den Brink et al, the sequences of these antibodies and all anti-virus antibodies in these papers and individually of their VH and VL domains are incorporated herein by reference for use in the invention and possible inclusion in one or more claims herein. In an example, the polypeptide of the invention comprises a first SAR-Cov antigen binding site and a second SAR-Cov antigen binding site wherein the first site comprises a VH/VL binding site of CR3022 and the second site compriss a VH/VL binding site of an antibody selected from CR3006, CR3013 and CR3014 (eg, CR3022/3014; CR3022/3006; CR3022/3013 or CR3022/3014). In an example, the multimer of the invention comprises a first SAR-Cov antigen binding site and a second SAR-Cov antigen binding site wherein the first site comprises a VH/VL binding site of CR3022 and the second site compriss a VH/VL binding site of an antibody selected from CR3006, CR3013 and CR3014 (eg, CR3022/3014; CR3022/3006; CR3022/3013 or CR3022/3014).

[1697] In a configuration, the polypeptide of the invention comprises one or more binding sites for human TMPRSS2 protein, for example, the polypeptide comprises a binding site for TMPRSS2 protein as disclosed in US20190300625, eg, the VH/VL pair of any anti-TMPRSS2 antibody disclosed in US20190300625, eg wherein the binding site comprises SEQ ID NOs: 17 and 18 disclosed in US20190300625; all of these sequences and binding site disclosures are incorporated herein by reference for use in the present invention and for possible inclusion in one or more claims herein. In a configuration, the polypeptide of the invention comprises one or more binding sites for human IL-6R, for example, the polypeptide comprises the VH/VL pair of sarilumab. In a configuration, the polypeptide of the invention comprises one or more binding sites for human IL-4R, for example, the polypeptide comprises the VH/VL pair of dupilumab. In a configuration, the polypeptide of the invention comprises one or more binding sites for human OX40L or OX40, eg, the VH/VL pair of oxelumab.

[1698] In a configuration, the multimer of the invention comprises binding sites for human TMPRSS2 protein, for example, the multimer comprises a plurality of copies of a binding site for TMPRSS2 protein as disclosed in US20190300625, eg, the VH/VL pair of any anti-TMPRSS2 antibody disclosed in US20190300625, eg wherein the binding site comprises SEQ ID NOs: 17 and 18 disclosed in US20190300625; all of these sequences and binding site disclosures are incorporated herein by reference for use in the present invention and for possible inclusion in one or more claims herein. In a configuration, the multimer of the invention comprises a plurality of copies of a binding sites for human IL-6R, for example, the VH/VL pair of sarilumab. In a configuration, the multimer of the invention comprises a plurality of copies of a binding sites for human IL-4R, for example, the VH/VL pair of dupilumab. In a configuration, the multimer of the invention comprises binding sites for human OX40L or OX40, eg, a plurality of clpies of the VH/VL pair of oxelumab.

[1699] Thus, generally multimers of the invention may advantageously be cross-reactive to more than one antigen (ie, bind to more than one antigen, such as first and second antigens which are different from each other); or may be capable of binding to an antigen using binding sites of the multimer, wherein the binding site as a monomer or dimer is not capable of binding to the antigen. For example, the binding by the multimer and by the monomer or dimer form are tested under identical conditions (eg, of temperature, pH, time and antigen concentration). For example, the binding site as a monomer or dimer means that one or two copies (but no more than one or two respectively) of the binding site when comprised by a protein are not capable of binding to the antigen (first antigen). Thus, in that example the protein is monovalent or bivalent for the antigen. For example, the binding site is a VH/VL binding site of a 4-chain antibody having 2 copies (but no more than 2) of the antigen binding site, wherein the antibody is not capable of binding to the antigen (eg, TACI); optionally the antigen is an antigen that is cognate to a receptor or ligand (eg, APRIL when the antigen is TACI; eg, the antigen is a ligand is cognate to a receptor (or another, second ligand); or the antigen is a receptor and is cognate to a ligand) wherein the receptor or first ligand is capable of binding to a second antigen and the antibody is capable of binding to the second antigen (eg, BCMA when the first antigen is TACI), and wherein a multimer of the invention is capable of binding to the first and second antigens. Thus, in an example, the first antigen is TACI and the second antigen is BCMA, and the multimer of the invention is capable of binding to TACI and BCMA. In another example, the first antigen is a SARS-Cov-2 antigen (eg, spike protein antigen) and the second antigen is a SARS-Cov-1 antigen (eg, spike protein antigen), and optionally the multimer of the invention is capable of binding to the first and second antigens. In another example, the first antigen is an antigen (eg, spike protein) of a first virus and the second antigen is an antigen (eg, spike protein) of a second virus, and optionally the multimer of the invention is capable of binding to the first and second antigens. The viruses are different, eg, the viruses are Coronaviruses; eg, the viruses are different strains of influenza viruses. For example, the first and second antigens are HIV antigens (eg, for the treatment or prevention of HIV infection or a symptom thereof); or P. falciparum antigens, such first and second CSP epitopes (eg, for the treatment or prevention of malaria or a symptom thereof); or Salmonella typhimurium antigens (eg, for the treatment or prevention of Salmonella infection or a symptom thereof. In an example, a multimer of the invention specifically binds to human BCMA and human TACI, and optionally the multimer comprises a plurality (eg, 4 and no more or less than 4) of a polypeptide of the invention wherein the polypeptide comprises a BCMA binding site as disclosed herein, such as in the next paragraph. Multimers that bind in these ways can be used in any method or use disclosed herein.

[1700] The invention, thus, provides:
[1701] A method of expanding the antigen binding specificity of a binding site, wherein the binding site binds a first antigen, but not a second antigen (eg, when administered to humans) when the binding site is comprised in monovalent or bivalent form by a protein that specifically binds to the first antigen, the method comprising providing a plurality of copies of a polypeptide of the invention, and multimerising at least 4 of the polypeptides to produce a multimer comprising at least 4 copies of the polypeptide, wherein the polypeptide comprises one, two or more copies of the binding site, whereby binding sites of the multimer are capable of binding the first and second antigens.
[1702] In another example, the invention provides:
[1703] Use of a polyepeptide of the invention in a method of manufacturing a multimer for expanding the antigen binding specificity of a binding site, wherein the binding site binds a first antigen, but not a second antigen (eg, when administered to humans) when the binding site is comprised in monovalent or bivalent form by a protein that specifically binds to the first antigen, wherein the method comprises providing a plurality of copies of a polypeptide of the invention, and multimerising at least 4 of the polypeptides to produce a multimer comprising at least 4 copies of the polypeptide, wherein the polypeptide comprises one, two or more copies of the binding site, whereby binding sites of the multimer are capable of binding the first and second antigens.
[1704] For this method and use: Optionally, the polypeptide comprises a SAM which is a TD, eg, a p53 TD. Optionally, the polypeptide comprises one (and no more than one) copy of the binding site.
[1705] Optionally, the polypeptide comprises two (and no more or less than two) copies of the binding site. I an example the binding site is a VH/VL binding site or a dAb. In an example, each antigen is a cell surface receptor or ligand, eg, a human cell surface receptor or ligand. In an example, each antigen is a cell surface receptor for a common ligand.

[1706] A “4-chain antibody”, as the skilled addressee will understand, is a conventional antibody format having 2 copies of a heavy chain and 2 copies of a light chain, wherein each heavy chain is paired with a respective light chain and the heavy chain Fc regions pair to form heavy chain dimers.

[1707] The invention, by providing the ability to create multimers with broadened antigen specificity, provides useful multimers, compositions, methods and uses to target viruses whose antigens evolve through mutation during the natural history of a viral infection. In this respect, the invention may provide broadly-antigen-neutralising multimers, which can be useful for treatment or prevention of HIV infections, CoV (eg Cov-1 or Cov-2) infections or malaria.

[1708] Thus, the invention may find application to shift antigen-binding specificity of a predetermined binding site against a first antigen so that the multimer additionally or alternatively binds to a second antigen. For example, this can be demonstrated where the predetermined binding site specifically binds to BCMA, wherein the multimer of the invention binds to BCMA and TACI. For example, the predetermined binding site is the BCMA binding site of JNJ64007957 (Johnson & Johnson), AMG420 (Amgen), AMG701 (Amgen), CC-93269 (Cellgene), RGN5458, (Regeneron), PF-06863135 (Pfizer), SEA-BCMA (Seattle Genetics), MEDI2228 (AstraZeneca), belantamab (GlaxoSmithKline), idecabtagene vicleucel (Celgene), JNJ-4528 (Johnson & Johnson, Nanjing Legend Biotech), P-BCMA-01 (Poseidon Therapeutics), bb21217 (Bluebird Bio), JCARH125 (Celgene, Juno) or ALLO-715 (Allogene). Preferably, the binding site is the BCMA binding site of JNJ64007957. Preferably, the binding site is the BCMA binding site of JNJ-4528. Preferably, the binding site is the BCMA binding site of RGN5458. In an example, the multimer in this paragraph is for treating a cancer, eg, multiple myeloma.

[1709] In any aspect of the invention herein, the polypeptide of the invention optionally comprises
[1710] A: one or more epitope binding sites, optionally wherein the binding site binds to (i) a SARS-Cov-2 antigen (eg, a SARS-Cov-1 antigen and a SARS-Cov-2 antigen); (ii) BCMA (B-cell maturation antigen) and TACI (transmembrane activator and calcium modulator and cyclophilin ligand interactor); (iii) first and second Coronovirus antigens; (iv) first and second HIV antigens; (v) first and second P falciparum antigens; (vi) first and second Salmonella antigens; (vii) a TMPRSS protein (eg, a TMPRSS2 antigen); or (viii) a ACE2 antigen; or
[1711] B: one, two or more copies of an ACE2 peptide (eg, an ACE2 extracellular domain) and/or a TMPRSS2 peptide (eg, a TMPRSS protein extracellular domain); or
[1712] C: a first binding site that binds to a Coronavirus antigen (eg, a SARS-Covantigen, preferably a SARS-Cov-1 or -2 antigen) and one or more copies of an ACE2 peptide (eg, an ACE2 extracellular domain) and/or a TMPRSS2 peptide (eg, a TMPRSS protein extracellular domain); or
[1713] D: a first binding site that binds to a ACE2 extracellular domain; and one or more copies of an ACE2 peptide (eg, an ACE2 extracellular domain) and/or a TMPRSS2 peptide (eg, a TMPRSS protein extracellular domain); or
[1714] E: a first binding site that binds to a TMPRSS2 peptide extracellular domain; and one or more copies of an ACE2 peptide (eg, an ACE2 extracellular domain) and/or a TMPRSS2 peptide (eg, a TMPRSS protein extracellular domain).
Such a polypeptide may be useful for producing multimers of the invention, and such multimers may be used for any method or use disclosed herein, such as for cancer (eg, multiple myeloma) treatment when the polypepide is according to option A(ii); or for treatment or prevention of a viral (eg, Covidvirus) infection when the polypepide is according to option A ((i), (iii), (vi) or (viii) or option B, C, D or E.

[1715] In one embodiment, the multimer is useful for binding to a first epitope and a second epitope which is a mutant of the first epitope, ie, wherein the second epitope differs from the first epitope by one or more amino acids or one or more sugar residues. For example, the epitopes differ by 2, 3, 4, 5, 6, 7, 8, 9, 10, 11, 12, 13, 14, 15, 16, 17, 18, 19, 20 or more amino acids or sugar residues. As shown in Example 25, multimerization of polypeptides described herein may produce multimers that can use the same binding site to bind more than one (eg, 2) different epitopes or antigens. Thus, in an example, the first epitope is comprised by a first antigen and the second epitope is comprised by a second antigen, eg, the antigens are different receptors (such as cell-surface receptors), or different ligands (such as different forms of spike protein of a virus). Optionally, the virus is a SARS virus (eg, SARS-Cov, SARS-Cov-2 or MERS-Cov), HIV or influenza virus. Optionally, the virus is HIV and the epitope is an Env epitope, gp41 epitope or gp120 epitope. Optionally, the virus is influenza virus and the epitope is an epitope of haemagglutinin or matrix protein 2. By providing a multimer that is capable of binding to different forms of a spike protein of such a virus, the multimer is useful for treating or preventing or reducing a seasonal viral infection in humans or animals. For example, the multimer is useful for treating, preventing or reducing infection by a virus comprising a first form of spike protein, and the multimer is useful for treating, preventing or reducing infection by a virus comprising a second form of the spike protein. Thus, in this way the multimer is useful for treating or preventing viral infection in a first and second season wherein humans are infected in the first season by the virus comprising the first spike form and humans are infected in the second season by the virus comprising the second spike form. Instead of a spike protein, the epitope may be a different virus antigen, such as a capsid or tail protein. The multimer, therefore, is capable of binding to different strains of a virus and preferably neutralises the virus (eg, renders it non-infective and/or reduces proliferation of the virus). Thus, in an embodiment the invention provides a seasonal virus treatment or prophylaxis medicament for administration to a human or animal subject, wherein the medicament comprises a plurality of multimers of the invention, such as multimers according to this paragraph, wherein the medicament comprises a pharmaceutically acceptable diluent, carrier or excipient. Such diluents, carriers and excipients are well known to the skilled person. Administration is, eg, intravenous, inhaled, oral or intranasal administration. The invention therefore provides in an embodiment: a multi-seasonal (eg, 2-seasonal or 3-seasonal) anti-viral medicament comprising a plurality of multimers of the invention which are capable of binding to first and second strains of the virus, wherein the strains differ in a surface-exposed antigen to which the multimers can bind. In an example, the seasons are a first year and a second year (eg, two consecutive years or two consecutive winters thereof, or two consecutive summers thereof, or two consecutive springs thereof, or two consecutive falls/autumns thereof). Optionally in any embodiment herein, the virus is a SARS virus (eg, SARS-Cov, SARS-Cov-2, MERS-Cov), HIV, ebola virus, zika virus, norovirus, rotovirus, respiratory synctial virus (RSV), an exanthematous virus, papilloma virus, hepatitis (eg, A, B, C, D or E) virus, Lassa fever virus, dengue fever virus, yellow fever virus, Marburg fever virus, Crimean-Congo fever virus, polio virus, viral meningitis virus, viral encephalitis virus, rabies virus, smallpox virus, hantavirus or influenza virus. When the multimer is useful or used in a method for reducing the virus in an animal, this is advantageous for reducing a zoonotic population of viruses that are transmissible to humans, wherein the viruses are capable of causing a disease or condition (or death) in humans. In this respect, the animal may be a livestock animal, such as a pig, poultry (eg, chicken, duck or turkey), sheep, cow, goat, fish or shellfish. In an example, the animal is a bat, racoon dog, dog, cat, palm civet or camelid (eg, a camel or dromedary). In an example, the animal is a bird.

[1716] By presenting multiple copies of the epitope(s) multimers of the invention are believed to provide useful means for vaccination and for stimulating strong immune responses in a human or animal. Thus, in an alternative, the multimers comprise a plurality (eg, 4, 8, 12, 16 or 20) of copies of a peptide, wherein the peptide comprises an epitope of a pathogen, such as a surface-exposed epitope of a virus or bacterium. For example, the peptide comprises a first and/or second epitope as described in the immediately preceding paragraph. In this way, there is provided a vaccine composition for administration to a human or animal for preventing or reducing an infection by the virus or bacterium. In an example, each polypeptide of the multimer comprises a first peptide comprising a first said epitope of the pathogen and a second peptide comprising a second said epitope of the pathogen. Optionally, the polypeptide comprises 2, 3, 4, 5, 6, 7, 8, 9 or 10 (eg, 2 or 3) said epitopes of the pathogen. Optionally, the polypeptide comprises 2, 3, 4, 5, 6, 7, 8, 9 or 10 (eg, 2 or 3) different epitopes of the pathogen.

[1717] For example, the virus is Coronavirus, eg, SARS-Cov, SARS-Cov-2, a SARS-related coronavirus (a SARSr-Cov), HCoV-OC43, HCoV-HKU1, HCoV-NL63, HCoV-229E. In an example, the virus is SARS-CoV ZXC21, ZC45, RaTG13, CUHK-W1, Urbani, GZ02, A031, A022, WIV16, WIV1, Rp3, Rs672 or HKU4. For example, the virus is Coronavirus is a group 1, group 2 or group 3 Coronavirus. For example, the multimer is a vaccine antigen composition comprising copies of a polypeptide of the invention. In an aspect, the polypeptide comprises one or more S epitopes of said virus. In an aspect, the polypeptide of the invention comprises a S1 and/or S2 epitope of said virus; or a S^{A} and/or S^{B} epitope of said virus (eg, a SARS-Cov-2 S^{A} and/or S^{B} epitope, preferably SARS-Cov-2 S^{B} epitope). In an aspect, the polypeptide comprises a peptide which comprises all or part of the S^{A} domain and/or all or part of the S^{B} domain. In an aspect, the polypeptide comprises a peptide which comprises all or part of the S^{B} domain and all or part of the S2 subunit, and optionally also the S 1/S2 boundary. Additionally or alternatively, the polypeptide comprises a peptide which comprises the virus spike protein S1 subunit/ S2 subunit boundary. Additionally or alternatively, the polypeptide comprises a peptide which comprises the virus spike protein furin cleavage site. In an alternative, the multimer comprises a plurality of binding sites for one or more of the epitopes, wherein the multimer comprises copies of a polypeptide of the invention wherein the polypeptide comprises one or more epitope binding sites, each epitope being an epitope as described in this paragraph.

[1718] In an example, the SARS-Cov epitope comprises one or more N-linked glycans, eg, where each N is an N selected from the following table or is a corresponding N in the virus.

Conservation of N-Linked Glycosylation Sequons in SARS-CoV-2 S and SARS-CoV S

| | |
|---|---|
| SARS-CoV-2 S | SARS-CoV S |
| N₁₇LT | T₂₁FD |
| P₂₅PA | N₂₉YT |
| N₆₁VT | N₆₅VT |
| H₆₉VS | N₇₃HT |
| N₇₄GT | ... |
| S₁₁₂KT | N₁₀₉KS |
| N₁₂₁NA | N₁₁₈NS |
| N₁₂₂AT | N₁₁₉ST |
| N₁₄₉KS | T₁₄₆QT |
| N₁₆₅CT | N₁₅₈CT |
| N₂₃₄IT | N₂₂₇IT |
| N₂₈₂GT | N₂₆₉GT |
| N₃₃₁IT | N₃₁₈IT |
| N₃₄₃AT | N₃₃₀AT |
| N₃₇₀SA | N₃₅₇ST |
| N₆₀₃TS | N₅₈₉AS |
| N₆₁₆CT | N₆₀₂CT |
| N₆₅₇NS | D₆₄₃TS |
| N₇₀₉NS | N₆₉₁NT |
| N₇₁₇FT | N₆₉₉FS |
| N₈₀₁FS | N₇₈₃FS |
| N₁₀₇₄FT | N₁₀₅₆FT |
| N₁₀₉₈GT | N₁₀₈₀GT |
| N₁₁₃₄NT | N₁₁₁₆NT |
| N₁₁₅₈HT | N₁₁₄₀HT |
| N₁₁₇₃AS | N₁₁₅₅AS |
| N₁₁₉₄ES | N₁₁₇₆ES |

Italic font indicates the absence of a glycosylation sequon and deletions are indicated with periods. Glycans observed in the SARS-CoV-2 S cryo-EM map are underlined. (see Walls AC, Park YJ, Tortorici MA, Wall A, McGuire AT, Veesler D. Structure, Function, and Antigenicity of the SARS-CoV-2 Spike Glycoprotein [published online ahead of print, 2020 Mar 6]. Cell. 2020;S0092-8674(20)30262-2. doi: 10.1016/j.cell.2020.02.058, the disclosure of which is incorporated herein by reference.

[1719] Position numbers are with reference to SARS-CoV-2 sequence with Accession Number: YP_009724390.1; and SARC-CoV Urbani sequence with Accession Number: AAP13441.1.

[1720] In an example, the virus is selected from SARS-CoV-2 (YP_009724390.1), SARSr-CoV RaTG13 (QHR63300.2), SARS-CoV Urbani (AAP13441.1), SARS-CoV CUHK-W1 (AAP13567.1), SARS-CoV GZ02 (AAS00003.1), SARS-CoV A031 (AAV97988.1), SARS-CoV A022 (AAV91631.1), WIV-16 (ALK02457.1), WIV-1 (AGZ48828.1), SARSr-CoV ZXC21 (AVP78042.1), SARSr-CoV ZC45 (AVP78031.1), SARSr-CoV Rp3 (Q3I5J5.1), SARSr-CoV Rs672 (ACU31032.1). Accession numbers are shown in brackets; the sequences thereof are explicitly incorporated herein by reference for use in the present invention, eg, for providing epitope or antigen sequence.

[1721] For example, the pathogen is HIV and the polypeptide comprises a gp120 epitope and a gp41 epitope, eg, the polypeptide comprises a SOSIP peptide.

[1722] For example, the pathogen is a Coronavirus (eg, SARS-Cov, SARS-Cov-2 or MERS-Cov) and the polypeptide comprises a first spike epitope and a second spike epitope, wherein the epitopes are different from each other. For example, the first epitope and/or second epitope comprises a sugar residue. For example, the first epitope comprises a viral contact residue for ACE2 and/or the second epitope comprises a viral contact reside for TMPRSS2 and optionally the virus is SARS-Cov or SARS-Cov-2. For example, the first epitope comprises a viral contact residue for DPP4 and/or the second epitope comprises a viral contact reside for TMPRSS2 and optionally the virus is MERS-Cov.

[1723] For example, the pathogen is influenza and the polypeptide comprises one or more haemagglutinin epitopes. Optionally, any influenza herein is influenza A, B or H1N1.

[1724] For example, the pathogen is HIV and the polypeptide comprises a plurality of Env epitopes.

[1725] For example, the pathogen is a virus (eg, a Coronavirus) and the polypeptide comprises a plurality of spike epitopes.

[1726] For example, the pathogen is a virus and the polypeptide comprises a plurality of capsid or tail epitopes.

[1727] In an example, the virus is a bacteriophage that is capable of infecting a host bacterial cell; or the virus is a virus that is capable of infecting an archaeal cell.

[1728] In an example, the pathogen is a bacterium selected from
[1729] Bacillus anthracis
[1730] Bacillus cereus
[1731] Bartonella henselae
[1732] Bartonella quintana
[1733] Bordetella pertussis
[1734] Borrelia burgdorferi
[1735] Borrelia garinii
[1736] Borrelia afzelii
[1737] Borrelia recurrentis
[1738] Brucella abortus
[1739] Brucella canis
[1740] Brucella melitensis
[1741] Brucella suis
[1742] Campylobacter jejuni
[1743] Chlamydia pneumoniae
[1744] Chlamydia trachomatis
[1745] Chlamydophila psittaci
[1746] Clostridium botulinum
[1747] Clostridium difficile
[1748] Clostridium perfringens
[1749] Clostridium tetani
[1750] Corynebacterium diphtheriae
[1751] Enterococcus faecalis
[1752] Enterococcus faecium
[1753] Escherichia coli
[1754] Francisella tularensis
[1755] Haemophilus influenzae
[1756] Helicobacter pylori
[1757] Legionella pneumophila
[1758] Leptospira interrogans
[1759] Leptospira santarosai
[1760] Leptospira weilii
[1761] Leptospira noguchii
[1762] Listeria monocytogenes
[1763] Mycobacterium leprae
[1764] Mycobacterium tuberculosis
[1765] Mycobacterium ulcerans
[1766] Mycoplasma pneumoniae
[1767] Neisseria gonorrhoeae
[1768] Neisseria meningitidis
[1769] Pseudomonas aeruginosa
[1770] Rickettsia rickettsii
[1771] Salmonella typhi
[1772] Salmonella typhimurium
[1773] Shigella sonnei
[1774] Staphylococcus aureus
[1775] Staphylococcus epidermidis
[1776] Staphylococcus saprophyticus
[1777] Streptococcus agalactiae
[1778] Streptococcus pneumoniae
[1779] Streptococcus pyogenes
[1780] Treponema pallidum
[1781] Ureaplasma urealyticum
[1782] Vibrio cholerae
[1783] Yersinia pestis
[1784] Yersinia enterocolitica; and
[1785] Yersinia pseudotuberculosis

[1786] The invention provides a protein comprising 4, 12, 16, 20, 24, 28 or 32 copies of an epitope disclosed herein, optionally also comprising 4, 12, 16, 20, 24, 28 or 32 copies of a second second epitope disclosed herein. Optionally, the protein is useful as a vaccine for treating or preventing an infection of a virus or bacterium in a human or animal subject, wherein the virus or bacterium comprises the epitope(s). Optionally, the protein is a multimer as disclosed herein, the multimer comprising four copies of a polypeptide, wherein the polypeptide comprises 1, 2, 3, 4, 5, 6, 7, or 8 copies of the first epitope (and optionally comprises 1, 2, 3, 4, 5, 6, 7, or 8 copies of the second epitope). In an alternative, the invention provides a protein comprising 4, 12, 16, 20, 24, 28 or 32 copies of a binding site that is capable of binding to an epitope disclosed herein, optionally also comprising 4, 12, 16, 20, 24, 28 or 32 copies of a second binding site that is capable of binding to a second epitope disclosed herein. Optionally, the protein is useful as a therapy for treating or preventing an infection of a virus or bacterium in a human or animal subject, wherein the virus or bacterium comprises the epitope(s). Optionally, the protein is a multimer as disclosed herein, the multimer comprising four copies of a polypeptide, wherein the polypeptide comprises 1, 2, 3, 4, 5, 6, 7, or 8 copies of the first epitope (and optionally comprises 1, 2, 3, 4, 5, 6, 7, or 8 copies of the second epitope). In an example, the protein is useful as an assay reagent for detecting a virus of bacterium comprising the epitope(s). To this end there is provided a first method of detecting the virus or bacterium in a sample (eg, in vitro), the method comprising contacting the sample with the protein to allow the protein to bind to one or more copies of the virus or bacterium in the sample, and detecting the binding, eg, using a detection reagent that binds to virus or bacteria that have bound to the protein. There is also provided a method of detecting antibodies that are capable of binding (and optionally neutralising) the virus or bacterium in a sample (eg, in vitro), the method comprising contacting the sample with the protein to allow the protein to bind to such antibodies in the sample, and detecting the binding, eg, using a detection reagent that binds to the antibodies that have bound to the protein. The detection reagent may be an anti-virus or bacterium agent (such as a labelled antibody) in the first method; or an anti-antibody (eg, anti-IgG or anti-IgM) agent (such as a labelled antibody) in the second method. The label may, for example, be a fluorescence label, eg, GFP. The sample may be a blood, spit, sputum or cell sample, eg, a patient sample, such as a patient that is suffering from, is suspected of suffering from or has suffered from an infection by the virus or bacterium. In an example, the protein or multimer of the invention is immobilised on a solid surface, eg, a petri dish or test tube surface, or a flow chamber surface. For example, the surface is a particle surface, eg, a bead surface, such a magenetic bead, magnetisable bead, metal or ferrous bead. In an example, the protein or multimer of the invention is comprised by a fluid, eg, a liquid, eg, a liquid in a droplet, such as an emulsion droplet. Thus, the protein or multimer is useful in a microfluidics method of detecting the virus, bacterium or antibody (eg, IgG or IgM that binds the virus or bacterium).

[1787] In an example, the polypeptide comprises one or more (eg, 1, 2, 3 or 4) protein G peptides each of which is capable of binding to IgG, or the protein or multimer comprises a plurality of such polypeptides. Such a multimer or protein is useful to capture IgG when the protein or sample is contacted with a sample (eg, blood, sputum, saliva, semen or cell sample), such as wherein the contacting is carried out in vitro, such as in an in vitro assay. The avidity effect of the multimer’s plurality of protein G peptides is useful to enhance IgG detection sensitivity . The invention, therefore, provides such an assay method and a kit comprising the protein or multimer (optionally immobilised on a solid surface, such as on the surface of a container) and a detection reagent. In an example, the reagent comprises an antigen or epitope that is bound (eg, specifically bound) by the captured IgG. Optionally, the epitope is a viral or bacterial epitope, eg, a viral spike, capsid or tail fibre epitope; or eg, a bacterial cell surface epitope. Optionally, the epitope is a virus spike epitope, eg, a Coronavirus spike epitope, such as a SARS-CoV or SARS-Cov-2 or MERS-CoV spike epitope. Optionally, the reagent comprises a label that is detectable, such as a fluorescence marker, eg, GFP or an Alexa fluor marker. Instead of a protein G peptide, additionally or alternatively the polypeptide, multimer or protein comprises one or more protein A peptides that are each capable of binding to an antibody Fc, such as a Fc of an anti-viral or anti-bacterial antibody from a patient sample. Instead of a protein G peptide, additionally or alternatively the polypeptide, multimer or protein comprises one or more protein L peptides that are each capable of binding to an antibody light chain, such as a light chain of an anti-viral or anti-bacterial antibody from a patient sample (eg, an IgG, IgM, IgA, IgE or IgD antibody).

[1788] See FIG. 45. The invention provides any reagent or combination of reagents disclosed in that figure, such as the reagent of any one of A-E or the configuration of reagents disclosed in any one of F to P.

[1789] Optionally, where the protein or multimer comprises binding sites for ACE2, the protein or multimer may be used for treating or preventing hypertension in a human or animal subject. Optionally, the protein or multimer comprises one or more ACE2 epitopes, wherein the protein or multimer may be used for treating or preventing hypertension in a human or animal subject, such as by administration of the protein or multimer to the subject to raise antibodies against ACE2 in the subject. Alternatively, the treatment or prevention is an inflammatory condition (eg, lung inflammation), pneumonia, COPD, asthma or any treatment or prevention of a condition disclosed in US20110020315A1, the disclosure of which is incorporated herein by reference.

[1790] Optionally, where the protein or multimer comprises binding sites for TMPRSS2, the protein or multimer may be used for treating or preventing a cancer (eg, prostate cancer) or viral infection (eg, influenza infection) in a human or animal subject. Optionally, the protein or multimer comprises one or more TMPRSS2 epitopes, wherein the protein or multimer may be used for treating or preventing a cancer (eg, prostate cancer) or viral infection (eg, influenza infection) in a human or animal subject, such as by administration of the protein or multimer to the subject to raise antibodies against TMPRSS2in the subject. Alternatively, the treatment or prevention is any treatment or prevention of a condition disclosed in US 9,498,529, the disclosure of which is incorporated herein by reference. For example, the inflammation is local inflammation of a tissue or an organ and/or a systemic inflammation. For example, the inflammation comprises sepsis. For example, the inflammation comprises an autoimmune disease.

[1791] Optionally, where the protein or multimer comprises copies of a binding site for a virus spike, the binding site may be the binding site of antibody 80R, CR3014, CR3006, CR3013 or CR3022. The VH and VL domain sequences of these antibodies are incorporated herein by reference for possible inclusion in a protein or multimer of the invention. Optionally, where the protein or multimer comprises copies of a binding site for a virus spike, the binding site is capable of binding to amino acid residues 426-492, 318-510, or 318-510 of S1 subunit of SARS-CoV, and wherein optionally the protein or multimer binds SARS-CoV and SARS-CoV-2.

[1792] Optionally, where the protein or multimer herein is for treating or preventing viral pneumonia in a human or animal subject, eg, wherein the subject is suffering from or is at risk of suffering from a Coronavirus infection. Optionally, where the protein or multimer herein is for treating or preventing Coronavirus viral pneumonia in a human or animal subject. Optionally, where the protein or multimer herein is for treating or preventing Coronavirus viral pneumonia in a human or animal subject, wherein the binding sites are capable of binding to a Pseudomonoas aeruginosa epitope, or wherein the protein or multimer comprises Pseudomonoas aeruginosa epitopes.

[1793] Optionally, where the protein or multimer herein is for treating or preventing a viral infection or symptom thereof in a human or animal subject, wherein the binding sites are capable of binding to a Cathepsin L epitope, or wherein the protein or multimer comprises Cathepsin L epitopes. In an example, the virus is Ebola virus or a SARS virus or a Coronavirus (eg, SARS-CoV or SARS-CoV-2).

[1794] Optionally, where the protein or multimer herein is for treating or preventing a Coronavirus infection or symptom thereof in a human or animal subject, wherein the binding sites are capable of binding SARS-CoV S1 RBD or RBDR, or wherein the protein or multimer comprises SARS-CoV S1 RBD or RBDR. The receptor-binding determining region (RBDR) that recognizes ACE2. For example, the binding sites are capable of binding the peptide S₄₇₁₋₅₀₃ of the RBD; or the protein or multimer comprises copies of S₄₇₁₋₅₀₃ of the RBD.

[1795] Optionally, where the protein or multimer herein is for treating or preventing a Coronavirus infection or symptom thereof in a human or animal subject, wherein the binding sites are capable of binding SARS-CoV-2 S1 RBD or RBDR, or wherein the protein or multimer comprises SARS-CoV-2 S1 RBD or RBDR. The receptor-binding determining region (RBDR) that recognizes ACE2. For example, the binding sites are capable of binding the peptide S₄₇₁₋₅₀₃ (ALNCYWPLNDYGFYTTTGIGYQPYRVVVLSFEL) (SEQ ID NO: 500) of the RBD; or the protein or multimer comprises copies of S₄₇₁₋₅₀₃ of the RBD. In an example, the protein or multimer comprises copies of a peptide comprises by the amino acid sequence from position 318 to 536 of SARS-CoV or the equivalent amino acid sequence of SARS-CoV-2, wherein the peptide comprises the amino acid sequence from position 424 to position 494. Optionally, the peptide is RBD219-N1 (see For example, Chen, W.; Hotez, P.J.; Bottazzi, M.E. Potential for Developing a SARS-CoV Receptor Binding Domain (RBD) Recombinant Protein as a Heterologous Human Vaccine against Coronavirus Infectious Disease (COVID)-19. Preprints 2020, 2020020449, the sequences of (i) RBD219-N1, (ii) the sequence in the blue box (the epitope consisting S343-367, 373-390 and 411-428 (reported by Bian et al)) and (iii) the sequences in the green box from the first N to QPY for each of RBD219-N1 and SARS-CoV-2 spike shown in FIG. 1 each is incorporated herein by reference for possible use in the invention (eg, the protein or multimer of the invention comprises one or more binding sites that binds to a said peptide of (i), (ii) or (iii); or the protein or multimer comprises one or more of peptides (i), (ii) and (iii)). Optionally, the protein or multimer of the invention comprises one or more copies of the antigen binding site of an antibody shown in Table 1 or 2 of Chen, W.; Hotez, P.J.; Bottazzi, M.E., “Potential for Developing a SARS-CoV Receptor Binding Domain (RBD) Recombinant Protein as a Heterologous Human Vaccine against Coronavirus Infectious Disease (COVID)-19”, Preprints 2020, 2020020449; or shown in Table 1 or 2 of Asian Pac J Allergy Immunol. 2020 Mar;38(1): 10-18. doi: 10.12932/AP-200220-0773, “Perspectives on monoclonal antibody therapy as potential therapeutic intervention for Coronavirus disease-19 (COVID-19)”, Shanmugaraj B et al; or shown in Table 1 of Zhou G, Zhao Q. Perspectives on therapeutic neutralizing antibodies against the Novel Coronavirus SARS-CoV-2. Int J Biol Sci. 2020;16(10):1718-1723, Published 2020 Mar 15, doi:10.7150/ijbs.45123; or shown in Table 1 of Trends in Immunology 2020, “Neutralizing Antibodies against SARS-CoV-2 and Other Human Coronaviruses”, Shibo Jiang, Christopher Hillyer, and Lanying Du (https://www.cell.com/trends/immunology/fulltext/S1471-4906(20)30057-0?rss=yes), the disclosures of all of which (including the VH and VL sequences of said antibodies) are incorporated herein by reference for use in the invention. Optionally, the protein or multimer comprises copies of a peptide, wherein the peptide comprises (i) 1, 2, 3, 4, 5, 6, 7, 8, 9, 10, 11, 12, 13 or 14 amino acids corresponding to amino acids selected from 415T, 439N, 449Y, 453Y, 455L, 486F, 487N, 489Y, 493Q, 498Q, 500T, 501N, 502G and 505Y of SARS-CoV-2 (eg, SARS-CoV-2 (YP_009724390.1)), (ii) amino acids corresponding to amino acids 486F, 487N, 489Y, 493Q, 498Q, 500T, 501N, 502G and 505Y of SARS-CoV-2 (eg, SARS-CoV-2 (YP_009724390.1)), (iii) an amino acid corresponding to amino acid 415T of SARS-CoV-2 (eg, SARS-CoV-2 (YP_009724390.1)), or (iv) amino acids corresponding to amino acids 439N, 449Y, 453Y, 455L of SARS-CoV-2 (eg, SARS-CoV-2 (YP_009724390.1)). Optionally, the protein or multimer comprises copies of a peptide, wherein the peptide comprises (i) 1, 2, 3, 4, 5, 6, 7, 8, 9, 10, 11, 12, 13 or 14 amino acids corresponding to amino acids selected from 415T, 439R, 449Y, 453Y, 455Y, 486L, 487N, 489Y, 493N, 498Y, 500T, 501T, 502G and 505Y of SARS-CoV (eg, SARS-CoV Urbani), (ii) amino acids corresponding to amino acids 486L, 487N, 489Y, 493N, 498Y, 500T, 501T, 502G and 505Y of SARS-CoV (eg, SARS-CoV Urbani), (iii) an amino acid corresponding to amino acid 415T of SARS-CoV (eg, SARS-CoV Urbani), or (iv) amino acids corresponding to amino acids 439R, 449Y, 453Y, 455Y of SARS-CoV (eg, SARS-CoV Urbani). Optionally, the protein or multimer comprises copies of binding site that binds to a peptide, wherein the peptide comprises (i) 1, 2, 3, 4, 5, 6, 7, 8, 9, 10, 11, 12, 13 or 14 amino acids selected from 415T, 439N, 449Y, 453Y, 455L, 486F, 487N, 489Y, 493Q, 498Q, 500T, 501N, 502G and 505Y of SARS-CoV-2 (eg, SARS-CoV-2 (YP_009724390.1)), (ii) amino acids c 486F, 487N, 489Y, 493Q, 498Q, 500T, 501N, 502G and 505Y of SARS-CoV-2 (eg, SARS-CoV-2 (YP_009724390.1)), (iii) amino acid 415T of SARS-CoV-2 (eg, SARS-CoV-2 (YP_009724390.1)), or (iv) amino acids 439N, 449Y, 453Y, 455L of SARS-CoV-2 (eg, SARS-CoV-2 (YP_009724390.1)). Optionally, the protein or multimer comprises copies of a comprises copies of binding site that binds to a peptide, wherein the peptide comprises (i) 1, 2, 3, 4, 5, 6, 7, 8, 9, 10, 11, 12, 13 or 14 amino acids selected from 415T, 439R, 449Y, 453Y, 455Y, 486L, 487N, 489Y, 493N, 498Y, 500T, 501T, 502G and 505Y of SARS-CoV (eg, SARS-CoV Urbani), (ii) amino acids 486L, 487N, 489Y, 493N, 498Y, 500T, 501T, 502G and 505Y of SARS-CoV (eg, SARS-CoV Urbani), (iii) amino acid 415T of SARS-CoV (eg, SARS-CoV Urbani), or (iv) amino acids 439R, 449Y, 453Y, 455Y of SARS-CoV (eg, SARS-CoV Urbani). Optionally, the binding sites are capable of binding the P6 peptide (EEQAKTFLDKFNHEAEDLFYQSSGLGKGDFR) (SEQ ID NO: 501) of the RBD; or the protein or multimer comprises copies of the P6 peptide (EEQAKTFLDKFNHEAEDLFYQSSGLGKGDFR) of the RBD. In an example, the binding site is the antigen binding site of an antibody selected from 80R, m396, F26G19, s230, CR3014, and CR3022. See, eg, Shah et al, doi: 10.21203/rs.3.rs-16932/vl, “Sequence variation of SARS-CoV-2 spike protein may facilitate stronger interaction with ACE2 promoting high infectivity” and supplementary materials, which are incorporated herein by reference. The binding site of the invention may, for example, comprise the VH/VL or scFv of antibody A, B, C, D or E in FIG. 3 of this reference, the sequence of which is incorporated herein by reference for use in the invention; and optionally the virus is a Coronavirus, such as SARS-CoV or SARS-CoV-2.

[1796] Optionally, the protein or multimer of the invention is for treating or preventing HIV and comprises one or more copies of the antigen binding site of an antibody shown in Table 1 or FIG. 4 of Annu. Rev. Immunol. 2016. 34:635-59, doi: 10.1146/annurev-immunol-041015-055515, “Broadly Neutralizing Antibodies to HIV and Their Role in Vaccine Design”, Dennis R. Burton and Lars Hangartner; the disclosures of all of which (including the VH and VL sequences of said antibodies) are incorporated herein by reference for use in the invention.

[1797] In an example, the protein or multimer comprises a plurality of (eg, 4, 8, 12, 12, 16, 20, 24, 28 or 32) copies of a peptide disclosed herein, eg, a peptide disclosed in the immediately preceding paragraph.

[1798] Optionally, where the protein or multimer herein is for treating or preventing a RSV infection or symptom thereof in a human or animal subject, wherein the binding sites are palivizumab binding sites.

[1799] Optionally, the binding site of the protein, multimer or polypeptide of the invention disclosed herein comprises a binding site for a peptide or epitope disclosed herein, or for a peptide or epitope whose amino acid sequence is at least 70, 75, 80, 85, 90, 95, 96, 97, 98 or 99% identical to the amino acid sequence of a peptide or epitope disclosed herein. Alternatively, the protein, multimer or polypeptide binding site competes (eg, in SPR) with a binding site disclosed in the first sentence of this paragraph.

[1800] In one configuration, the invention provides a RNA (eg, mRNA or self-amplifying mRNA, or saRNA) that encodes a polypeptide or protein of the invention. In an example, there is provided a medicament (eg, a vaccine) comprising the RNA, wherein the RNA is for administration to a human or animal subject for treating or preventing a disease or condition in the subject, wherein the RNA is expressed in the subject to produce polypeptides, proteins or multimers of the invention. Optionally, the medicament is a vaccine and the condition is a virial or bacterial infection, such as when the encoded polypeptide comprises an epitope of the virus or bacterium or a binding site that is capable of binding to such an epitope.

[1801] The polypeptide, protein or multimer can comprise multiple (i.e. 2, 3 or 4) different peptides of the target virus or bacterium (eg, peptides of cell-surface proteins) for use as vaccine. In another embodiment, there is provided a composition comprising first and a second multimer or protein of the invention wherein the multimers/proteins comprise peptides of the target virus or bacterium (eg, peptides of cell-surface proteins) for use as vaccine, wherein the peptides of the first multimer or protein differ from the peptides of the second multimer or protein. For example, the proteins or multimers do not comprise a common such peptide. For example, the second multimer or protein comprises a such peptide that is not comprised by the first protein or multimer. Optionally, the composition comprises a third protein or multimer which is different from the first and second proteins/multimers, wherein the third protein or multimer comprises a said peptide that is not comprised by the first and second proteins/multimers.

[1802] For a vaccine herein that targets a virus, the peptide or epitope is not limited to a spike epitope (eg, S1 or S2 subunit epitope); the virus epitope could be from any region of the virus, preferably a region that is exposed on the cell surface of the viral host.

[1803] Multimerizing virus or bacterial peptides or epitopes according to the invention may advantageously enhance immunogenicity in the subject and thus promote generation of anti-viral/bacterial antibodies that are desirably affinity matured and may give rise to antibodies with a broad epitope coverage (ie, more recognising more than one epitope) of the virus/bacterium.

### Providing New Specifity by Multimerisation & Cross-Reactive Multimers

[1804] Through multimerization made possible by the invention, certain aspects advantageously enable provision of new antigen specificities for binding sites; or new cross-reactivity of binding sites (eg, wherein a binding site in a control binds, such as an IgG, a first but not second antigen, but when present as a multimer of the invention binds both antigens - as exemplified herein). The multimerization also or alternatively can greatly enhance binding strength for an antigen, such as a viral antigen, thereby providing multimer format that are useful for human or animal therapy and for highly sensitive assays, eg, to detect antigen or virus in a sample, such as a serum sample of a subject. Again, such highly sensitive assaying is exemplified herein. Thus, the invention may render therapeutically- or prophylactically-useful a binding site that has hitherto been useless for therapy of prophylaxis of a disease or condition (eg, infection by a certain virus) in humans or animals. As exemplified herein, the multimerization of the invention converts binding based on anti-SARS-CoV-2 binding sites from therapeutically- or prophylactically-useless to therapeutically- or prophylactically-useful for administration of the multimer of the invention to a human or animal subject for treating (eg, reducing) or preventing a SARS-CoV-2 infection. Thus, the invention enables re-purposing of pre-existing antigen binding sites to provide for possible new applications for treatement, prevention or detection of a disease, condition or infection.

[1805] In a first aspect, the invention provides:

[1806] A protein multimer (first multimer) comprising more than 2 copies of a binding site, wherein the binding site is capable of binding to a first antigen, optionally wherein the multimer is capable of binding to the first antigen and a second antigen, wherein the antigens are different.

[1807] For example, the multimer comprises from 4 to 32 (eg, from 4 to 24, or from 4 to 20, or from 4 to 16) copies of the binding site, ie, this means that the multimer does not comprise any more or less than said number. In an embodiment, the multimer comprises, 4, 5, 6, 7, 8, 9, 10, 11, 12, 13, 14, 15, 16, 17, 18, 19, 20, 21, 22, 23, 24, 25, 26, 27, 28, 29, 30, 31 or 32 copies of the binding site.

[1808] For example, the multimer contains from 4 to 32 (eg, from 4 to 24, or from 4 to 20, or from 4 to 16) copies of the binding site, ie, this means that the multimer does not have any more or less than said number. In an embodiment, the multimer contains, 4, 5, 6, 7, 8, 9, 10, 11, 12, 13, 14, 15, 16, 17, 18, 19, 20, 21, 22, 23, 24, 25, 26, 27, 28, 29, 30, 31 or 32 copies of the binding site. For example, the binding site is any binding site mentioned herein, for example, any VH, VL, VHH, dAb, nanobody, VH/VL pair, sybody or scFv.

[1809] In an embodiment, a control protein multimer comprising 1 or 2 (but no more than 1 or 2 respectively) of said binding sites is not capable of binding to the first antigen; or is capable of binding to the first antigen, but not to the second antigen. This is exemplified herein in Example 25. Binding may be determined by an ELISA assay, such as by determining OD₄₅₀, for example in an ELISA assay described herein. In an example, the first antigen is BCMA and the second antigen is TACI. Optionally, the antigens are human antigens. Optionally, the antigens are bacterial, archaeal or fungal antigens. Alternatively, the antigens are different viral antigens, or antigens of first and second viruses which viruses are different from each other, eg, SARS-CoV and SARS-CoV-2. Optionally, the virus antigens are spike proteins. Alternatively, the virus antigens are nucleocapsid (N) proteins. Alternatively, the virus antigens are envelope (E) proteins. Alternatively, the virus antigens are membrane (M) proteins. Optionally, the antigens of first and second viruses are different and the viruses are different strains of the same type of virus (eg, SARS-CoV strains; or SARS-CoV-2 strains; or influenza strains). Optionally, the antigens of first and second viruses are different and the viruses are different types of virus, eg, SARS-CoV and SARS-CoV-2.

[1810] The invention also provides multimers of binding sites that bind to virus antigens, as expemplified herein. Thus, the invention provides:

[1811] A protein multimer (first multimer) comprising more than 2 copies of a binding site, wherein the binding site is capable of binding to a virus protein (eg, a virus spike, E, M or N protein) of a first virus, optionally wherein the multimer is capable of binding to the first and a second virus, wherein the viruses are different. This is exemplified herein for 2 different viruses. For example, the multimer comprises 4 copies of the binding site, wherein the binding site is capable of binding to the virus protein (first virus protein) and a second virus protein which is a mutated version of the first virus protein, wherein the second virus protein is found in a second virus that is infectious to humans. For example, the first and second viruses are SARS viruses or coronaviruses, eg, SARS-CoV-2 viruses. For example, the first protein is a SARS-CoV-2 spike protein comprising the amino acid N501 (ie, asparagine at position 501) and the second protein is a a SARS-CoV-2 spike protein comprising the amino acid Y501 (ie, tyrosine at position 501) or T501. Additionally or alternatively, the first protein comprises E484 and the second protein comprises K484; and/or the first protein comprises K417 and the second protein comprises N417 or T417. Additionally or alternatively, compared to the first protein, the second protein comprises deletion ΔHV69-70, ΔY144 or ΔLLA242-244. Additionally or alternatively, the first protein comprises A222 and the second protein comprises V222; and/or the first protein comprises N439 and the second protein comprises K439; and/or the first protein comprises S477 and the second protein comprises N477; and/or the first protein comprises Y453 and the second protein comprises F453; and/or the first protein comprises F486 and the second protein comprises L486; and/or the first protein comprises G261 and the second protein comprises D261; and/or the first protein comprises V367 and the second protein comprises F367. Thus, we have discovered that multimers, as per the invention, comprising at least 4 copies of a binding site that binds to SARS-CoV-2 spike protein, such as the RBD (and preferably the inner face of the RBD) are particularly useful as medicaments (or diagnostic agents to idenfity the presence of the virus). As exemplified in Example 37, a multimer that recognises the epitope recognised by QB-GB binding site is capable of binding to several such mutant forms of SARS-CoV-2 spike and is well suited for administration to patients (or a human population) for treating or preventing SARS-CoV-2 infection, such as where some degree of resistance to mutants occurring during the life history of the virus is desired.

[1812] Optionally, each virus is a coronavirus. Optionally, one of the viruses is SARS-CoV and the other virus is SARS-Cov-2. For example, the first virus is SARS-CoV and the second virus is SARS-Cov-2. In an alternative, the first virus is SARS-CoV-2 and the second virus is SARS-Cov.

[1813] Optionally, the multimer comprises 4 copies of the binding site. Optionally, the multimer comprises 4 (but no more than 4) copies of the binding site. Optionally, the multimer comprises 8 (but no more than 8) copies of the binding site. Optionally, the multimer comprises 12 (but no more than 12) copies of the binding site. Optionally, the multimer comprises 16 (but no more than 16) copies of the binding site. Optionally, the multimer comprises 20 (but no more than 20) copies of the binding site. Optionally, the multimer comprises 24 (but no more than 24) copies of the binding site. Optionally, the multimer comprises 4, 8, 12, 16, 20 or 24 copies of the binding site.

[1814] Optionally,
[1815] (a) the binding of the multimer to the first antigen (or first virus protein) is stronger than the binding of a second multimer (eg, an immunoglobulin, such as an IgG) to the first antigen (or first virus protein), wherein the second multimer comprises 2 (but no more than 2) copies of said binding site; and/or
[1816] (b) the binding of the multimer to the second antigen (or a protein of the second virus, eg, a spike, E, M or N protein of the second virus) is stronger than the binding of a or said second multimer (eg, an immunoglobulin, such as an IgG) to the second antigen (or second virus protein), wherein the second multimer comprises 2 (but no more than 2) copies of said binding site.

[1817] Optionally,
[1818] (a) the binding of the multimer to the first virus spike protein is stronger than the binding of a second multimer (eg, an immunoglobulin, such as an IgG) to the first antigen (or first virus spike protein), wherein the second multimer comprises 2 (but no more than 2) copies of said binding site; and/or
[1819] (b) the binding of the multimer to a spike protein of the second virus is stronger than the binding of a or said second multimer (eg, an immunoglobulin, such as an IgG) to the second virus spike protein, wherein the second multimer comprises 2 (but no more than 2) copies of said binding site.

[1820] Optionally,
[1821] (a) the binding of the multimer to the first virus nucleocapsid (N) protein is stronger than the binding of a second multimer (eg, an immunoglobulin, such as an IgG) to the first virus N protein, wherein the second multimer comprises 2 (but no more than 2) copies of said binding site; and/or
[1822] (b) the binding of the multimer to a N protein of the second virus is stronger than the binding of a or said second multimer (eg, an immunoglobulin, such as an IgG) to the second virus N protein, wherein the second multimer comprises 2 (but no more than 2) copies of said binding site.

[1823] Optionally,
[1824] (a) the binding of the multimer to the first virus membrane (M) protein is stronger than the binding of a second multimer (eg, an immunoglobulin, such as an IgG) to the first virus M protein, wherein the second multimer comprises 2 (but no more than 2) copies of said binding site; and/or
[1825] (b) the binding of the multimer to a M protein of the second virus is stronger than the binding of a or said second multimer (eg, an immunoglobulin, such as an IgG) to the second virus M protein, wherein the second multimer comprises 2 (but no more than 2) copies of said binding site.

[1826] Optionally,
[1827] (a) the binding of the multimer to the first virus envelope (E) protein is stronger than the binding of a second multimer (eg, an immunoglobulin, such as an IgG) to the first virus E protein), wherein the second multimer comprises 2 (but no more than 2) copies of said binding site; and/or
[1828] (b) the binding of the multimer to a E protein of the second virus is stronger than the binding of a or said second multimer (eg, an immunoglobulin, such as an IgG) to the second virus E protein, wherein the second multimer comprises 2 (but no more than 2) copies of said binding site.

[1829] Preferably, binding or binding strength is determined by ELISA, eg, by determining OD₄₅₀. An ELISA herein may be carried out at room temperature and pressure (rtp), or preferably at 20 or 25 centigrade and 1 atmosphere.

[1830] Optionally,
[1831] (a) the first multimer binds to the first antigen (or first virus protein, eg, spike protein) with an OD₄₅₀ from 1 to 3 (such as from 1 to 2 or from 2 to 3) in an ELISA assay in which the first antigen or protein is at a concentration of 1 nM in the assay (and optionally the second multimer binds to the first antigen or protein with an OD₄₅₀ less than 0.5 in an ELISA assay in which the antigen or protein is at a concentration of 1 nM in the assay);
[1832] (b) the first multimer (i) binds to a first virus spike protein trimer with an OD₄₅₀ from 2 to 3 in an ELISA assay in which the spike protein is at a concentration of 1 nM in the assay and (ii) binds to a first virus spike protein monomer with an OD₄₅₀ from 1 to 2 in an ELISA assay in which the spike protein is at a concentration of 1 nM in the assay (optionally wherein the binding site comprises an ACE2 extracellular protein); and/or
[1833] (c) the first multimer binds to the first antigen (or a first virus protein) with an OD₄₅₀ from 2 to 3 (optionally from 2.5 to 3) in an ELISA assay in which the first antigen or protein is at a concentration of 10 nM in the assay (and optionally the second multimer binds to the first antigen or protein with an OD₄₅₀ from 1 to 2 in an ELISA assay in which the antigen or protein is at a concentration of 10 nM in the assay).

[1834] In an example, the multimer binds according to (a). In an example, the multimer binds according to (b). In an example, the multimer binds according to (c). In an example, the multimer binds according to (a) and (b). In an example, the multimer binds according to (a) and (c). In an example, the multimer binds according to (a), (b) and (c). In an example, the multimer binds according to (b) and (c). These are exemplified herein.

[1835] Binding of the the first multimer with said OD₄₅₀ indicates that the first multimer (ie, multimer of the invention) is useful for medical use, ie, therapy or prophylaxis of a disease or condition in a human or animal subject wherein the disease or condition is mediated by the first antigen (or a pathogen comprising the first antigen). Binding of the the second multimer (eg, IgG having only 2 of said binding sites) with said OD₄₅₀ indicates that the second multimer is not useful for medical use or said therapy or prophylaxis.

[1836] Binding of the the first multimer with said OD₄₅₀ indicates that the first multimer (ie, multimer of the invention) is useful for assaying for detecting the presence of the first antigen or antibodies against the first antigen in a bodily fluid sample of a human or animal, eg, a serum, saliva or cell sample obtained from a human or animal, wherein the human or animal (i) is suffering from, has suffered from or is suspected of suffering from a disease or conditionthat is mediated by the first antigen, or (ii) is suffering from, has suffered from or is suspected of suffering from an infection by a pathogen that comprises the first antigen, such as a virus, bacterium or fungus (eg, a yeast). Binding of the the second multimer (eg, IgG having only 2 of said binding sites) with said OD₄₅₀ indicates that the second multimer is not useful for such assaying or detection.

[1837] Generally, an Ig (eg, IgG) that binds to its cognate antigen with an affinity (Kd) higher than 1, 10, 100 or 1000 mM are not useful as medicaments. In an example, the binding site of the multimer of the invention is an antigen binding site of an Ig (eg, IgG) Fab fragment that binds to the antigen with an affinity (Kd) higher than 0.1, 1, 10, 100 or 1000 mM (eg, higher than 1 or 10 mM). Optionally, the Ig is said second multimer. In an example, the multimer of the invention binds to the antigen with an apparent affinity (avidity) of lower than 0.1 mM, 100 nM, 10 nM, 1 nM, 100 pM, 10 pM, 1 pM or 100 fM. These affinities are amenable to medical use. Affinities are may be determined by any standard method, for example by surface plasmon resonance (SPR) or ELISA, or bilayer interferometry (eg, as per the example below). The method may be carried out at rtp, or optionally at 20 or 25° C.entrigrade and 1 atm and optionally at a pH from 6.5 to 7.5 (eg, at pH 7). Reference is made to Science. 2020 May 8;368(6491):630-633. doi: 10.1 126/science.abb7269. Epub 2020 Apr 3, “A highly conserved cryptic epitope in the receptor binding domains of SARS-CoV-2 and SARS-CoV”, Yuan M et al, which determined binding affinity using a Fab version of CR3022, it can be seen CR3022 binds spike RBD of CoV-2 with at least 100x less affinity than CoV-1. The Kd for CR3022 for CoV-2 is around 115 nM. A multimer of the invention comprising 4 copies of the CR3022 binding site will have a Kd in the low pM range, thereby greatly improving on the apparent affinity and rendering the multimer useful as a medicament. We expect also a large improvement in affinity (expected to be in the double of single digit pM range or less) for the multimer binding to RBD of the CoV-1 strain. We would expect binding to such RBD with higher affinity again in the low pM range.

### Example Biolayer Interferometry Binding Assay

[1838] Binding assays may performed by biolayer interferometry (BLI) using an Octet Red® instrument (ForteBio). Briefly, His6-tagged antigen (eg, S or RBD protein) at 20 to 100 µg/mL in 1x kinetics buffer (1x PBS, pH 7.4, 0.01% BSA and 83 0.002% Tween 20) are loaded onto Anti-Penta-HIS™ (HIS1K) biosensors and incubated with the indicated concentrations of Fab or IgG (eg, CR3022 Fab or IgG) or multimer. The assay comprises fivesteps: 1) baseline: 60 s with 1x kinetics buffer; 2) loading: 300 s with his6-tagged proteins; 3) baseline: 60 s with 1x kinetics buffer; 4) association: 120 s with samples (Fab or IgG or multimer); and 5) dissociation: 120 s with 1x kinetics buffer. For estimating the exact Kd, a 1:1 binding model is used.

### Example ELISA Assay

[1839] ELISAs are performed in duplicates to compare the binding affinities of the different product formats. Recombinant antigen is diluted to 1 ug/ml in ELISA coating buffer (50 mM carbonate/bicarbonate). One hundred ul of 1 ug/ml antigen is added to each well of an ELISA plate and the plates are incubated overnight at 4° C. The plates are washed three times with PBS containing 0.05% Tween-20 before being blocked with 200 ul 1% bovine serum albumin in PBS for 4 hrs at room temperature. The plates are washed three times as before. Products (multimers or other protein to be tested) are serially diluted in PBS containing 0.05% Tween-20. One hundred ul of sample is added to each well and the plates are incubated overnight at 4° C. The plates are washed four times with PBS containing 0.05% Tween-20. One hundred ul of detection antibody (anti-His-HRP, A7058, Sigma; or antiHuman-IgG HRP, 31410, Thermo Fisher Scientific; or Protein L HRP, M00098, Genscript) diluted in blocking buffer (according to the manufacturers’ recommendations) is added to each well and the plates are incubated at room temperature for 2 h. Following four plate washes, 25 ul of TMB substrate solution (Thermo Fisher Scientific) is added to each well. The reaction is terminated after ~ 15 min by the addition of 25 ul 3 M HCl. The absorbance at 450 nm is read using a CLARIOstar™ microplate reader (BMG Labtech).

### Example SPR Binding Assay

[1840] The SPR is carried out at a detergent level of no greater than 0.05% by volume, eg, in the presence of P20 (polysorbate 20; eg, Tween-20™) at 0.05% and EDTA at 3 mM. In one example, the SPR is carried out at 25° C. or 37° C. in a buffer at pH7.6, 150 mM NaCl, 0.05% detergent (eg, P20) and 3 mM EDTA. The buffer can contain 10 mM Hepes. In one example, the SPR is carried out at 25° C. or 37° C. in HBS-EP. HBS-EP is available from Teknova Inc (California; catalogue number H8022). In an example, the affinity (eg, of a VH/VL binding site) is determined using SPR by using any standard SPR apparatus, such as by Biacore™ or using the ProteOn XPR36™ (Bio-Rad®). The binding data can be fitted to 1:1 model inherent using standard techniques, eg, using a model inherent to the ProteOn XPR36™ analysis software.

[1841] Optionally,
[1842] (a) the first multimer binds to the first antigen (or first virus protein, eg, spike protein) with an OD₄₅₀ from 1 to 3 (such as from 1 to 2 or from 2 to 3) in an ELISA assay in which the antigen or protein is at a concentration of 1 nM in the assay (and optionally the second multimer binds to the first antigen or protein with an OD₄₅₀ less than 0.5 in an ELISA assay in which the antigen or protein is at a concentration of 1 nM in the assay);
[1843] (b) the first multimer (i) binds to a first virus spike protein trimer with an OD₄₅₀ from 2 to 3 in an ELISA assay in which the spike protein is at a concentration of 1 nM in the assay and (ii) binds to a first virus spike protein monomer with an OD₄₅₀ from 1 to 2 in an ELISA assay in which the spike protein is at a concentration of 1 nM in the assay (optionally wherein the binding site comprises an ACE2 extracellular protein); and/or
[1844] (c) the first multimer binds to the first antigen (or first virus protein, eg, spike protein) with an OD₄₅₀ from 2 to 3 (optionally from 2.5 to 3) in an ELISA assay in which the antigen or protein is at a concentration of 10 nM in the assay (and optionally the second multimer binds to the first antigen or protein with an OD₄₅₀ from 1 to 2 in an ELISA assay in which the antigen or protein is at a concentration of 10 nM in the assay).

[1845] In an example, the multimer binds according to (a). In an example, the multimer binds according to (b). In an example, the multimer binds according to (c). In an example, the multimer binds according to (a) and (b). In an example, the multimer binds according to (a) and (c). In an example, the multimer binds according to (a), (b) and (c). In an example, the multimer binds according to (b) and (c). These are exemplified herein.

[1846] Optionally, binding of the first multimer to the first antigen or protein is saturated as determined by OD₄₅₀ in an ELISA assay in which the antigen or protein is at a concentration between 10 and 100 nM in the assay (and optionally the second multimer binds to the first antigen or protein with an OD₄₅₀ less than 2.5 (eg, from 2 to 2.5) in an ELISA assay in which the antigen or protein is at a concentration between 10 and 100 nM in the assay).

[1847] Optionally,
[1848] (a) the first multimer binds to the second antigen (or second virus protein, eg, spike protein) with an OD₄₅₀ from 1 to 2 in an ELISA assay in which the second antigen or protein is at a concentration of 1 nM in the assay (and optionally the second multimer binds to the second antigen or protein with an OD₄₅₀ less than 0.5 in an ELISA assay in which the antigen or protein is at a concentration of 1 nM in the assay); and/or
[1849] (b) the first multimer binds to the second antigen (or second virus protein, eg, spike protein) with an OD₄₅₀ from 2 to 3 (optionally from 2.5 to 3) in an ELISA assay in which the second antigen or protein is at a concentration of 10 nM in the assay (and optionally the second multimer binds to the second antigen or protein with an OD₄₅₀ from 0.5 to 1.5 (eg, 0.5 to 1) in an ELISA assay in which the antigen or protein is at a concentration of 10 nM in the assay).

[1850] Optionally, binding of the first multimer to the second antigen or protein is saturated as determined by OD₄₅₀ in an ELISA assay in which the antigen or protein is at a concentration between 10 and 100 nM in the assay (and optionally the second multimer binds to the second antigen or protein with an OD₄₅₀ less than 1.5 (eg, from 1 to 1.5) in an ELISA assay in which the antigen or protein is at a concentration between 10 and 100 nM in the assay).

[1851] Optionally, the multimer is capable of detectably binding to antibodies that bind to the first antigen or the second antigen or virus protein (eg, anti-virus protein antibodies, such as anti-SARS-Cov spike antibodies or anti-SARS-Cov-2 spike antibodies or anti-influenza haemagglutinin antibodies) in an ELISA assay, wherein detection of the multimer binding is measured by OD₄₅₀ and the assay comprises
[1852] (a) Optionally diluting a serum sample of a mammal between 100 and 10⁶-fold;
[1853] (b) Contacting the antigen or protein (eg, SARS-Cov-2 spike protein) with the a serum sample of a mammal (which optionally has been diluted in step (a)) whereby anti-antigen or protein antibodies present in the sample bind to the antigen or protein, wherein the antigen or protein is immobilised on a solid surface;
[1854] (c) Contacting the bound antibodies with copies of the multimer; and
[1855] (d) Detecting multimer bound to antibody.

[1856] ELISA herein may be a sandwich ELISA.

[1857] Optionally, the dilution is from 10 to 10⁴, 10⁵ or 10⁶-fold. Optionally, the dilution is from 100 to 10⁴, 10⁵ or 10⁶-fold. Optionally, the dilution is from 1000 to 10⁴, 10⁵ or 10⁶-fold. Preferably, the dilution is 1000 to 1,000,000-fold (such as 1000 to 100,000-fold or 1000 to 10,000-fold). Optionally, dilution is dilution with water or an aqueous solution, eg, PBS, such as PBS containing from 0.1 to 0.05% (eg, either 0.1% or 0.05%) Tween-20. This is exemplified herein, demonstrating the possibility of extremely sensitive assaying using multimers of the invention comprising more than 2 (eg, at least 4) binding site copies.

[1858] Optionally, the spike protein is a trimer of polypeptides.

[1859] Optionally, the binding site is an antibody VH/VL pair or an antibody single variable domain (such as a nanobody, VHH or a dAb).

[1860] Optionally, the binding site is
[1861] (a) The spike protein binding site of an antibody selected from CR3022, CR3014, or any other anti-coronavirus antibody disclosed herein (eg, an antibody of Table 21);
[1862] (b) An ACE2 protein which is capable of binding to the first virus spike protein; or
[1863] (c) A TMPRSS2 protein which is capable of binding to the first virus spike protein.

[1864] Optionally, the binding site comprises or consists of an ACE2 extracellular protein. Optionally, the ACE2 protein is human ACE2 protein. For example, an extracellular protein of ACE2 having UNIPROT number Q9BYF1, the sequence of such ACE2 and the extracellular domain thereof being incorporated herein by reference, along with the nucleotide sequence encoding such. In an example, ACE2 extracellular protein comprises or consists of positions 18 to 615 or 18 to 740 of ACE2 having UNIPROT number Q9BYF1, the sequence comprising or consisting of positions 18 to 740 being incorporated herein by reference, along with the nucleotide sequence encoding such.

[1865] Optionally, the binding site comprises or consists of an TMPRSS2 extracellular protein. Optionally, the TMPRSS2 protein is human TMPRSS2 protein. For example, an extracellular protein of TMPRSS2 having UNIPROT number 015393, the sequence of such TMPRSS2 and the extracellular domain thereof being incorporated herein by reference, along with the nucleotide sequence encoding such. In an example, TMPRSS2 extracellular protein comprises or consists of positions 106 to 492 of TMPRSS2 having UNIPROT number 015393, the sequence comprising or consisting of positions 106 to 492 being incorporated herein by reference, along with the nucleotide sequence encoding such.

[1866] Optionally, the binding site is an antibody VH/VL pair, wherein the VH comprises an amino acid sequence of a VH disclosed in Table 23 and the VL comprises the amino acid sequence of the cognate VL disclosed in Table 23. Optionally, the binding site comprises an scFv disclosed in Table 23. Optionally, the binding site comprises an antibody single variable domain (eg, a VHH, nanobody, dAb, VH or VL) disclosed in Table 23, Table 32 or elsewhere herein.

[1867] Optionally, the binding site is an antibody VH/VL pair, wherein the VH comprises an amino acid sequence of a VH disclosed in Table 32 and the VL comprises the amino acid sequence of the cognate VL disclosed in Table 32. Optionally, the binding site comprises an scFv disclosed in Table 32.

[1868] Optionally, the multimer comprises a multimer of a polypeptide disclosed in Table 23, optionally wherein the polypeptide is a polypeptide in the Table that comprises a TD.

[1869] Optionally, the multimer comprises a multimer of a polypeptide disclosed in Table 32, optionally wherein the polypeptide is a polypeptide in the Table that comprises a TD.

[1870] Any amino acid sequence in Table 23, Table 32 or elsewhere herein that ends at its C-terminus in TVS may in the alternative be provided as the indentical sequence except that the alternative ends in TVSS. Any amino acid sequence in Table 23, Table 32 or elsewhere herein that ends at its C-terminus in TVSS may in the alternative be provided as the indentical sequence except that the alternative ends in TVS.

[1871] The multimer may be a multimer of any format disclosed herein. The multimer may be a multimer of any polypeptide dislosed herein.

[1872] Optionally, the multimer comprises more than 2 (eg, comprises 4) copies of a heavy/light chain pair, wherein each heavy chain comprises (in N- to C-terminal direction) a VH and an antibody constant region (eg, an Fc) and wherein each light chain comprises (in N- to C-terminal direction) a VL and an antibody constant region (eg, a CL), wherein the binding site of the multimer comprises the VH paired with the VL; optionally wherein each heavy chain comprises a self-assembly multimerization domain (such as a tetramerization domain, such as a p53 TD). Optionally, each heavy chain comprises a hinge region as disclosed herein.

[1873] Optionally, the multimer comprises more than 2 (eg, comprises 4) copies of a polypeptide, wherein the polypeptide comprises (in N- to C-terminal direction) a single variable domain and a multimerization domain (eg, a tetramerization domain, such as a p53 TD), and optionally an antibody constant region (eg, an Fc or CL) between the single variable domain and the multimerization domain, or the multimersiation domain is between the single variabl domain and the constant region.

[1874] In an aspect, the invention provides assays and methods:-
[1875] A method for detecting the presence of an antigen in a sample, the method comprising combining the sample with a multimer of the invention, allowing antigen in the sample to bind multimers to form antigen/multimer complexes and detecting antigen/multimer complexes.
[1876] The antigen may be a virus antigen, eg, a spike, M, E or N antigen, or a coronavirus antigen. The antigen may be comprised by an antibody present in the sample, eg, an antibody that is capable of binding do an antigen of an infectious disease pathogen (such as a virus or bacterium) or an antigen that is capable of binding to a human protein.
[1877] The sample may be a blood sample, serum sample, sputum sample, cell sample, saliva sample, bodily fluid sample of an animal or human subject. Optionally, the sample is diluted before said detection, eg, before said combining. Dilution may be any fold dilution disclosed herein, eg, and dilution by a PBS solution or water.
[1878] Optionally, the antigen is immobilised on a solid surface before or after said combining. Immobilisation may be carried out by binding the antigen to an anti-antigen immunoglobulin or superantigen that is bound to the solid surface. Examples of superantigens are Proteins A, L and G or antibody-binding fragments thereof. Immobilisation may be carried out by binding the antigen to a multimer of the invention that is bound to the solid surface, wherein the binding sites of the multimer are capable of binding to the antigen, eg wherein the antigen is comprised by an antibody. For example, the binding site is an antibody binding site of Protein G, A or L. Thus, in an example multimers of the invention are bound to a solid surface, the surface is contacted with the sample wherein antigen (eg, antibodies or virus particles) comprised by the sample are bound to multimers of the invention to form antigen/multimer complexes, and complexes are detected thereby determining the presence of the antigen in the sample. In a different example, the antigen is comprised by antibodies that are capable of binding to a second antigen (eg, a human, bacteria, fungal or viral protein, such as a viral spike, M, E or N protein), wherein the second antigen is immobilised on a solid surface, the surface is contacted with the sample, wherein antibodies comprised by the sample bind to the second antigen to form second antigen/antibody complexes, and complexes are contacted with multimers of the invention wherein multimers bind to antibodies whereby second antigen/antibody/multimer complexes are formed, and second antigen/antibody/multimer complexes are detected thereby determining the presence of said antibodies in the sample. For example, the antibodies are IgM, IgG, IgD, IgE or IgA antibodies, preferably IgM, IgG or IgA antibodies.
[1879] In an example, the method further comprises isolating complexes and optionally obtaining sequence information of antigen (first antigen, eg, antibodies) comprised by complexes. Optionally, the sequence may be inserted into an expression vector and expressed to produce proteins, eg, wherein the proteins are isolated. For example, VH and/or VL domain amino acid sequence of antibodies comprised by complexes is obtained and use to express copies of the VH and/or VL in an expression host, eg, CHO or HEK cell.

[1880] Optionally, the method is an ELISA method, eg, a sandwich ELISA. The method is carried out in vitro.

[1881] Suitable assay example formats are shown FIGS. 50-55, as well as reagents and polypeptides for making multimers of the invention that are useful for the methods and assays. The examples show assay formats relating to SARS-CoV and SARS-CoV2, but they are equally applicable mutatis mutandis to detecting pathogens (eg, any virus, bacterium or fungus) other than SARS-CoV and SARS-CoV2 and the disclosures of FIG. 50-55 can therefore in the alternative be read as relating to any pathogen, any pathogen antigen or protein, any anti-pathogen antibody and any other suitable multimer of the invention.

[1882] For example, the invention provides an assay comprising a format shown in any of FIGS. 50-55 for detecting the presence of a pathogen (eg, any virus, bacterium or fungus), anti-pathogen antibodies or a pathogen protein in a sample (eg, in serum, blood, saliva or any other sample disclosed herein). In an example, the pathogen is a coronavirus, eg, SARS-CoV or SARS-CoV-2, or infuenza virus or HIV, or any other virus disclosed herein.

[1883] In an embodiment, there is provided:-

[1884] A method of detecting the presence of anti-SARS-Cov-2 protein (eg, spike, M, E or N) antibodies in a serum sample, the method comprising carrying out an ELISA assay (eg, an assay disclosed herein), and the assay comprises
[1885] (a) Optionally diluting the serum sample from 10 to 10⁶-fold;
[1886] (b) contacting the SARS-Cov-2 protein with the serum sample (which optinally is diluted in step (a)) whereby anti-SARS-Cov-2 protein antibodies present in the sample bind to the virus protein to produce virus protein/antibody complexes; and
[1887] (c) contacting anti-SARS-Cov-2 virus protein antibodies with copies of the multimer of the invention; and
[1888] (d) detecting multimer bound to virus protein/antibody complexes, the detecting comprising detection of the multimer binding, optionally by determining optical density (eg, OD₄₅₀);
wherein the steps can be carried out in the order (a) (b) (c) and (d) or (a) (c) (b) and (d), or wherein steps (b) and (c) are carried out simultaneously and between steps (a) and (d).

[1889] The method is carried out in vitro. In an alternative, the antibodies are antibodies that bind to a protein of SARS-CoV or a different coronavirus. Optionally, the antibodies are antibodies that bind to a N, M or E proteins of a coronavirus, eg SARS-CoV or SARS-Cov-2.

[1890] Optionally, the presence of anti-antigen or protein antibodies (eg, anti-virus protein antibodies, such as anti-SARS-Cov-2 spike antibodies) in the sample is detected when the optical density (eg, OD₄₅₀) is greater than 0.1 or 0.5 (optionally, greater than 1, 1.5 or 2) in the assay.

[1891] Optionally wherein the spike protein is immobilised on a solid surface. Alternatively, the multimers are immobilised on a solid surface.

[1892] Optionally, the dilution is 1000 to 1,000,000-fold (such as 1000 to 100,000-fold or 1000 to 10,000-fold) or any other fold dilution disclosed herein. Optionally, the dilution is from 10 to 10⁴, 10⁵ or 10⁶-fold. Optionally, the dilution is from 100 to 10⁴, 10⁵ or 10⁶-fold. Optionally, the dilution is from 1000 to 10⁴, 10⁵ or 10⁶-fold. Optionally, dilution is dilution with water or an aqueous solution, eg, PBS, such as PBS containing from 0.1 to 0.05% (eg, either 0.1% or 0.05%) Tween-20.

[1893] Optionally, the spike protein is a trimer of polypeptides. For example, the spike protein is a monomer of either S1 or S2 spike ectodomain, a trimer of the spike, monomer of the spike receptor binding domain (RBD domain); or a RBD multimer, such as a dimer, trimer, tetramer or octamer of the RBD.

[1894] In an alternative to binding spike, the multimer of may bind a Nucleocapsid (N protein), membrane protein (M protein) or envelope protein (E protein) and the disclsoures herein referring to spike protein binding can apply mutatis mutandis to those alternatives.

[1895] Before carrying the method herein the serum sample may have been obtained by taking a blood sample or other bodily fluid sample from a mammal (eg, a human or animal, such as any animal disclosed herein). In an example, the human is a human suspected of having previously been infected or currently infected by a pathogen, eg a virus, bacterium or fungus comprising the antigen (first antigen), eg, SARS-CoV or SARS-Cov-2. For example, the human is a male, female, adult, teenager, child, baby or a human of at least 10, 20, 30, 40, 50, 60, 70 or 80 years’ of age (preferably over 50).

[1896] In embodiments, the binding site of the multimer is
[1897] (a) The spike protein binding site of an antibody, optionally an antibody selected from CR3022, CR3014, or any other anti-coronavirus antibody disclosed herein (eg, an antibody of Table 21);
[1898] (b) An ACE2 protein which is capable of binding to the spike protein; or
[1899] (c) A TMPRSS2 protein which is capable of binding to the spike protein.

[1900] Optionally, the multimer is a multimer of a polypeptide disclosed in Table 24, optionally wherein the polypeptide is a polypeptide in the Table that comprise a TD.

[1901] Optionally, the multimer comprises a plurality of copies of an Ig binding domain disclosed in Table 25, optionally wherein the multimer further comprises a plurality of copies of a further (ie, different) Ig binding domain disclosed in Table 25,

[1902] Optionally, the binding site of the multimer is alternatively capable of binding to an antibody (eg, an antibody that is capable of binding a human antigen, viral antigen, bacterial antigen or fungal antigen, such as an anti-SARS-Cov2 antibody, optionally wherein the binding site is comprised by
[1903] (a) Protein G or a fragment thereof;
[1904] (b) Protein A or a fragment thereof;
[1905] (c) Protein L or a fragment thereof; or
[1906] (d) An scFv or antibody single variable domain.

[1907] Optionally, step (c) is carried out before step (b), wherein the protein A, G, L or fragment, scFv or variable domain binding sites of the multimers bind a plurality of copies of the antibody (eg, anti-SARS-Cov2 antibody). For this option, the multimers may be immobilised on a solid support.

[1908] Optionally, the multimers are immobilised on a solid surface. Optionally, in any method or assay herein, the step of determining optical density (eg, OD₄₅₀) comprises labelling complexes comprising first antigen or protein (eg, spike protein) and multimers with horseradish peroxidase (HRP) and detecting the label (optionally at a wavelength of 450 nm). For example, the HRP is contacted with tetramethyl benzidine and abosorbance is read at 450 nm, whereby OD₄₅₀ is determined.

[1909] The invention also provides:-

[1910] A pharmaceutical composition or assay reagent comprising a plurality of multimers of the invention, optionally wherein the reagent comprises said multimers immobilised on a solid support.

[1911] In an example the following provide the solid support: Beads, petri dish, a laboratory apparatus, flow cell or a swab or dipstick. The support may be sterile or suitable for medical use.

[1912] For example, the pharmaceutical composition comprises a pharmaceutically-acceptable carrier, diluent or excipient.

[1913] The invention also provides:-

[1914] A multimer of the invention for administration to a human or animal subject for medical use.

[1915] A multimer of the invention for administration to a human or animal subject for treatment or prevention of an infection by a pathogen (eg, a virus, bacterium or fungus) that comprises the first antigen or protein, or a symptom of such an infection (eg, an unwanted inflammatory response).

[1916] A multimer of the invention for administration to a human or animal subject for treatment or prevention of an infection by the first and/or second virus, or a symptom of such an infection (eg, an unwanted inflammatory response).

[1917] A method of treating a disease, condition or symptom thereof in a human or animal subject, the method comprising administering to the subject a plurality of multimers of the invention. For example, the disease, condition or symptom is caused by the first antigen or protein (or by a pathogen that comprises the first antigen or protein, such as a virus that comprises the antigen or protein).

[1918] A method of treating a viral infection or symptom thereof in a human or animal subject, the method comprising administering to the subject a plurality of multimers of the invention.

[1919] The composition or multimers of the invention may be admistered in said use or method to the subject by any means, such as intravenously, orally, by inhalation or any other route disclosed herein.

[1920] The invention also provides:-

[1921] An assay kit comprising a reagent of the invention and an amount of the first antigen or protein (eg, viral spike protein), optionally wherein the reagent and protein are comprised by different containers.

### Expanding Utility of Binding Sites Through Multimerisation

[1922] Examples 23 -26 demonstrate how advantageously multimerization of the invention can repurpose a binding site which otherwise would not be useful or much less useful, such as for medical use (eg, for treatment or prophylaxis of a disease or condition mediated by or associated with an antigen to which the binding site binds), or for assay use (eg, detecting a pathogen or antigen that mediates, causes or is adversely associated with a a disease or condition in a subject). Through multimerization of the invention, very high-order multimers (eg, containing 8-24 copies of a binding site) can easily be achieved in a stable multimer that can be readily expressed, such as in eukaryotic expression systems and host cells (as demonstrated in the exemplification herein). The high-order multimers usefully can repurpose binding sites that individually have relatively low binding strength for an antigen, wherein in the multimers an avidity effect is produced rendering the combined binding strength of copies of the binding site well suited to medical applications or very sensitive assay detection of low levels of antigens in samples. Usefully, for example, we demonstrate this even for very diluted samples where the antigen is at very low concentration. This is advantageous, for example where the antigen is an antigen of a pathogen (eg, a virus, bacterium or fungus that causes disease, such as in humans, animals or plants); or where the antigen is comprised by antibodies produced by a human or animal subject in response to immunisation, such as in response to a pathogen or a human protein in the subject.

[1923] Thus, in an embodiment, the invention provides:-

[1924] A method of expanding a utility of an antigen (eg, a protein) binding site, the method comprising producing a multimer of the invention, wherein the multimer comprises a plurality of copies (eg, at least 4 or 8 copies) of the binding site.

[1925] In an example the utility is a medical utility, such as treating or preventing a disesase or condition mediated by the antigen in a human or animal subject (eg, an infection caused by a pathogen comprising the antigen). In an example the utility is an assay or detection method for determining the presence or relative amount of the antigen (or a pathogen comprising the antigen) or antibodies that bind the antigen in a sample (eg, an environmental sample or any sample of a human or animal subject disclosed herein). In an example, the method increases the sensitivity of assaying for the antigen or antibodies in a sample. For example, the sample is a blood or serum or saliva sample which has been diluted, such as diluted with fold dilution disclosed herein. For example, the utlity is a reduced propensity for producing false positive results in assaying for the presence of the antigen or antibodies that bind the antigen in a sample.

### Exemplary Polypeptides & Multimers

[1926] In examples, the invention provides a polypeptide comprising one or more copies of an antigen binding domain (BD), the polypeptide comprising or consisting of, in N- to C-terminal direction
[1927] (a) BD-TD;
[1928] (b) TD-BD;
[1929] (c) BD-BD-TD;
[1930] (d) TD-BD-BD
[1931] (e) BD-TD-BD-BD
[1932] (f) BD-BD-TD-BD
[1933] (g) BD-BD-TD-BD-BD.

[1934] Preferably in these examples, TD is a p53 TD, eg, a human p53TD.

[1935] Optionally, the BD is a single variable domain (also referred to as a domain antibody or dAb, eg, a nanobody or VHH, eg, a single variable domain comprising SEQ ID NO: 288, preferably Nb-112). Preferably, BD comprises the amino acid of QB-GB (SEQ ID NO: 307). Preferably, BD comprises the amino acid of QB-BG. Preferably, the BD comprises the amino acid of QB-FE. Preferably, BD comprises the amino acid of SEQ ID NO: 288. For example, the BD comprises an amino acid sequence that is at least 80, 85, 90, 95, 96, 97, 98 or 99% identical to SEQ ID NO: 288. Preferably, BD comprises the amino acid sequence of a VH or VL disclosed in Table 32 (optionally wherein in the multimer each said VH is paired with the cognate VL shown in Table 32; or optionally wherein in the multimer each said VL is paired with the cognate VH shown in Table 32, eg, the pair comprises the VH and VL of REGN10987, REGN10933 or CB6). Preferably, BD comprises the VH or VL of REGN10987 (optionally wherein in the multimer each said VH is paired with the VL of REGN10987; or optionally wherein in the multimer each said VL is paired with the VH of REGN10987). Preferably, BD comprises the VH or VL of REGN10933 (optionally wherein in the multimer each said VH is paired with the VL of REGN10933; or optionally wherein in the multimer each said VL is paired with the VH of REGN10933). Preferably, BD comprises the VH or VL of CB6 (optionally wherein in the multimer each said VH is paired with the VL of CB6; or optionally wherein in the multimer each said VL is paired with the VH of CB6). Antibody CB6 is also known as LY-CoV555.

[1936] Optionally, example (a) is BD-CH1-TD, where BD= an antibody VH domain and CH1 is an antibody CH1 domain. In an embodiment, this polypeptide is paired with a second polypeptide comprising or consisting of, in N- to C-terminal direction BD2-CL, wherein BD2=an antibody VL domain, wherein the VH and VL form an antigen binding site and the CH1 pairs with the CL. An optional peptide linker may be between the TD and a domain (eg, the CH1) that is immediately N-terminal to the TD in the polypeptide. Multimerisation of 4 copies of the polypeptide using TDs produces a multimer (ie, tetramer) comprising 4 identical antigen binding sites, see, eg, FIG. 53A. The invention provides such a multimer.

[1937] For example, in the immediately preceding paragraph BD and BD2 respectively comprise the VH and VL of an antibody selected from REGN10987, REGN10933 and CB6 (see Table 32 for sequences). For example, the multimer comprises the monomer (middle schematic) shown in any of FIGS. 16-A to 16-C. For example, in the immediately preceding paragraph BD and BD2 respectively comprise the VH and VL of an antibody selected from REGN10987, REGN10933, CB6, rRBD-15 (ABLINK Biotech Co., Ltd / Chengdu Medical College), B38, H4 (Capital Medical University, Beijing), FYB-207 (Formycon AG), ABP300 (Abpro Corporation), BRII-198 (Brii Biosciences, TSB Therapeutics (Beijing) CO.LTD), BRII-196 (Brii Biosciences, TSB Therapeutics (Beijing) CO.LTD), CT-P59 (Celltrion), HFB-3013, or HFB30132A (HiFiBiO Therapeutics), MW33 (Mabwell), SAB-185 (SAB Biotherapeutics), Etesevimab (Junshi Biosciences), SCTA01 or H014 (University of Chinese Academy of Sciences), STI-1499 or COVI-GUARD (Sorrento Therapeutics), TY027 (Tychan), COVI-AMG™ or STI-2020 (Sorrento Therapeutics), HLX70 (Hengenix Biotech Inc), ADM03820 (Ology Bioservices), an antibody comprised by XAV-19 (Nantes University Hospital), BGB DXP-593 or DXP-604 (BeiGene), VIR-7831 or GSK4182136 (Vir Biotechnology, GSK), AZD8895 or AZD1061 (AstraZeneca), HBM9022 or 47D11 (AbbVie, Harbour BioMed, Utrecht University and Erasmus Medical Center), Ab8 (University of Pittsburgh), MAbCo19 (AchilleS Vaccines Srl), AR-701 or AR-711 (Aridis Pharmaceuticals), DXP-604 (BeiGene), Centi-B9 (Centivax), GIGA-2050 (GigaGen), TATX-03 or TATX-06 or TATX-09 or TATX-13 or TATX-16 (ImmunoPrecise Antibodies), MTX-COVAB (Memo Therapeutics), NOVOAB-20 (NovoAb), COVI-SHIELD (Sorrento Therapeutics), STI-4920 or ACE-MAB or CMAB020 (MabPharm), IDB003 (IDBiologics) and VIR-7832 (Vir Biotechnology, GSK).

[1938] For example, the effector domain or binding domain or binding site of a polypeptide herein comprises the VH and/or VL of an antibody selected from REGN10987, REGN10933, CB6, rRBD-15 (ABLINK Biotech Co., Ltd / Chengdu Medical College), B38, H4 (Capital Medical University, Beijing), FYB-207 (Formycon AG), ABP300 (Abpro Corporation), BRII-198 (Brii Biosciences, TSB Therapeutics (Beijing) CO.LTD), BRII-196 (Brii Biosciences, TSB Therapeutics (Beijing) CO.LTD), CT-P59 (Celltrion), HFB-3013, or HFB30132A (HiFiBiO Therapeutics), MW33 (Mabwell), SAB-185 (SAB Biotherapeutics), Etesevimab (Junshi Biosciences), SCTA01 or H014 (University of Chinese Academy of Sciences), STI-1499 or COVI-GUARD (Sorrento Therapeutics), TY027 (Tychan), COVI-AMG™ or STI-2020 (Sorrento Therapeutics), HLX70 (Hengenix Biotech Inc), ADM03820 (Ology Bioservices), an antibody comprised by XAV-19 (Nantes University Hospital), BGB DXP-593 or DXP-604 (BeiGene), VIR-7831 or GSK4182136 (Vir Biotechnology, GSK), AZD8895 or AZD1061 (AstraZeneca), HBM9022 or 47D11 (AbbVie, Harbour BioMed, Utrecht University and Erasmus Medical Center), Ab8 (University of Pittsburgh), MAbCo19 (AchilleS Vaccines Srl), AR-701 or AR-711 (Aridis Pharmaceuticals), DXP-604 (BeiGene), Centi-B9 (Centivax), GIGA-2050 (GigaGen), TATX-03 or TATX-06 or TATX-09 or TATX-13 or TATX-16 (ImmunoPrecise Antibodies), MTX-COVAB (Memo Therapeutics), NOVOAB-20 (NovoAb), COVI-SHIELD (Sorrento Therapeutics), STI-4920 or ACE-MAB or CMAB020 (MabPharm), IDB003 (IDBiologics) and VIR-7832 (Vir Biotechnology, GSK).

[1939] For example, the multimer herein comprises at least 4 copies (eg, 4, 8, 12, 16, 20, 24 or 28 copies) of the VH and/or VL of an antibody selected from REGN10987, REGN10933, CB6, rRBD-15 (ABLINK Biotech Co., Ltd / Chengdu Medical College), B38, H4 (Capital Medical University, Beijing), FYB-207 (Formycon AG), ABP300 (Abpro Corporation), BRII-198 (Brii Biosciences, TSB Therapeutics (Beijing) CO.LTD), BRII-196 (Brii Biosciences, TSB Therapeutics (Beijing) CO.LTD), CT-P59 (Celltrion), HFB-3013, or HFB30132A (HiFiBiO Therapeutics), MW33 (Mabwell), SAB-185 (SAB Biotherapeutics), Etesevimab (Junshi Biosciences), SCTA01 or H014 (University of Chinese Academy of Sciences), STI-1499 or COVI-GUARD (Sorrento Therapeutics), TY027 (Tychan), COVI-AMG™ or STI-2020 (Sorrento Therapeutics), HLX70 (Hengenix Biotech Inc), ADM03820 (Ology Bioservices), an antibody comprised by XAV-19 (Nantes University Hospital), BGB DXP-593 or DXP-604 (BeiGene), VIR-7831 or GSK4182136 (Vir Biotechnology, GSK), AZD8895 or AZD1061 (AstraZeneca), HBM9022 or 47D11 (AbbVie, Harbour BioMed, Utrecht University and Erasmus Medical Center), Ab8 (University of Pittsburgh), MAbCo19 (AchilleS Vaccines Srl), AR-701 or AR-711 (Aridis Pharmaceuticals), DXP-604 (BeiGene), Centi-B9 (Centivax), GIGA-2050 (GigaGen), TATX-03 or TATX-06 or TATX-09 or TATX-13 or TATX-16 (ImmunoPrecise Antibodies), MTX-COVAB (Memo Therapeutics), NOVOAB-20 (NovoAb), COVI-SHIELD (Sorrento Therapeutics), STI-4920 or ACE-MAB or CMAB020 (MabPharm), IDB003 (IDBiologics) and VIR-7832 (Vir Biotechnology, GSK). The multimer may comprise no more than said number of copies.

[1940] In an example, there is a provided a tetramer of an antibody (or a fragment of an antibody, eg, a Fab of an antibody), wherein the tetramer is tetramersised using tetramerization domains (TDs). For example, the tetramer has the configuration shown in the right-hand-side schematic of any one of FIGS. 14C, 14-D, 15-I, 15-J and 16-A to 16-C(and there may further be other moieties, such as one or more additional peptides, domains or proteins comprised by the tetramer that are not shown in said Figure). In an example, there is provided an antibody (or a fragment of an antibody, eg, a Fab of an antibody), wherein the antibody or fragment comprises a TD (eg, a p53 TD), preferably wherein the TD is at the N-terminus of at least one of the polypeptide chains of the antibody or fragment. For example, one or both of the heavy chains of the antibody or fragment comprise a TD at its N-terminus. For example, one or both of the light chains of the antibody or fragment comprise a TD at its N-terminus. For example, the antibody or fragment has the configuration shown in the middle schematic of any one of FIGS. 14C, 14-D, 15-I, 15-J and 16-A to 16-C (and there may further be other moieties, such as one or more additional peptides, domains or proteins comprised by the antibody or fragment that are not shown in said Figure). In an embodiment, the antibody is an antibody disclosed in the immediately preceding paragraph. In an embodiment, there is provided a tetramer of said antibody or fragment that comprises a TD.

[1941] A multimer or tetramer herein may have the configuration shown in the any one of the Figures herein (and there may further be other moieties, such as one or more additional peptides, domains or proteins comprised by the multimer or tetramer that are not shown in said Figure). A multimer or tetramer herein may have the configuration shown in the right-hand-side schematic of any one of FIGS. 14A to 14-F, 15-A to 15-L and 16-A to 16-C(and there may further be other moieties, such as one or more additional peptides, domains or proteins comprised by the multimer or tetramer that are not shown in said Figure). A polypeptide or monomer herein may have the configuration shown in any one of the Figures herein (and there may further be other moieties, such as one or more additional peptides, domains or proteins comprised by the polypeptide or monomer that are not shown in said Figure). A polypeptide or monomer herein may have the configuration shown in the middle schematic of any one of FIGS. 14A to 14-F, 15-A to 15-L and 16-A to 16-C (and there may further be other moieties, such as one or more additional peptides, domains or proteins comprised by the polypeptide or monomer that are not shown in said Figure). In the multimer or tetramer the multimer the multimer or tetramer may comprise 4 VH/VL pairs, such as shown in the right-hand-side schematic of any one of FIGS. 14A to 14-F, 15-A to 15-L and 16-A to 16-C. For example, each of said VH/VL pairs is a VH/VL antigen binding site comprised by an antibody disclosed herein eg, any antibody selected from REGN10987, REGN10933, CB6, rRBD-15 (ABLINK Biotech Co., Ltd / Chengdu Medical College), B38, H4 (Capital Medical University, Beijing), FYB-207 (Formycon AG), ABP300 (Abpro Corporation), BRII-198 (Brii Biosciences, TSB Therapeutics (Beijing) CO.LTD), BRII-196 (Brii Biosciences, TSB Therapeutics (Beijing) CO.LTD), CT-P59 (Celltrion), HFB-3013, or HFB30132A (HiFiBiO Therapeutics), MW33 (Mabwell), SAB-185 (SAB Biotherapeutics), Etesevimab (Junshi Biosciences), SCTA01 or H014 (University of Chinese Academy of Sciences), STI-1499 or COVI-GUARD (Sorrento Therapeutics), TY027 (Tychan), COVI-AMG™ or STI-2020 (Sorrento Therapeutics), HLX70 (Hengenix Biotech Inc), ADM03820 (Ology Bioservices), an antibody comprised by XAV-19 (Nantes University Hospital), BGB DXP-593 or DXP-604 (BeiGene), VIR-7831 or GSK4182136 (Vir Biotechnology, GSK), AZD8895 or AZD1061 (AstraZeneca), HBM9022 or 47D11(AbbVie, Harbour BioMed, Utrecht University and Erasmus Medical Center), Ab8 (University of Pittsburgh), MAbCo19 (AchilleS Vaccines Srl), AR-701 or AR-711 (Aridis Pharmaceuticals), DXP-604 (BeiGene), Centi-B9 (Centivax), GIGA-2050 (GigaGen), TATX-03 or TATX-06 or TATX-09 or TATX-13 or TATX-16 (ImmunoPrecise Antibodies), MTX-COVAB (Memo Therapeutics), NOVOAB-20 (NovoAb), COVI-SHIELD (Sorrento Therapeutics), STI-4920 or ACE-MAB or CMAB020 (MabPharm), IDB003 (IDBiologics) and VIR-7832 (Vir Biotechnology, GSK).

[1942] There is provided a mixture of at least 2 (eg, 2 or 3) different multimers, wherein each multimer is according to the invention. For example, a first of said multimers comprises 4 copies of an antigen binding site that is capable of binding to a first antigen; and a second of said multimers comprises 4 copies of an antigen binding site that is capable of binding to a second antigen, optionally the antigens are identical and the binding sites bind different epitopes comprised by the antigen, or the antigens are different. For example, the or each antigen is an antigen of a virus, eg, SARS-CoV or SARS-Cov-2 antigen, such as spike antigen, or the virus is influenza virus or any other virus disclosed herein. For example, wherein a first of said multimers comprises 4 copies of the SARS-CoV-2 antigen binding site of REGN10987, and a second of said multimers comprises 4 copies of the SARS-CoV-2 antigen binding site of REGN10933.

[1943] For example, the binding site (eg, BD or BD2) of a polypeptide or multimer herein comprises the variable domain of Nb11-59 (Shanghai Novamab Biopharmaceuticals Co., Ltd.), MERS VHH-55, SARS VHH-72 or VHH303 72-Fc. For example, the binding site (eg, BD or BD2) of a polypeptide or multimer herein comprises a Darpin of MP0420 or MP0423.

[1944] Optionally, example (a) is BD-CH1-hinge-Fc-TD, where BD= an antibody VH domain and CH1 is an antibody CH1 domain, optionally the hinge is devoid of a core hinge region or is any other hinge disclosed herein and Fc is an antibody Fc region (ie, CH2-CH3). In an embodiment, this polypeptide is paired with a second polypeptide comprising or consisting of, in N- to C-terminal direction BD2-CL, wherein BD2=an antibody VL domain, wherein the VH and VL form an antigen binding site and the CH1 pairs with the CL. An optional peptide linker may be between the TD and a domain (eg, the CH3) that is immediately N-terminal to the TD in the polypeptide. Multimerisation of 4 copies of the polypeptide using TDs produces a multimer (ie, tetramer) comprising 4 identical antigen binding sites, see, eg, FIG. 53C. The invention provides such a multimer. In an alternative, example (a) is BD-Fc-TD (eg, see FIGS. 54C, 55C) and multimers thereof are also provided by the invention, such as tetramers of such polypeptide.

[1945] In an example, the invention provides a polypeptide comprising an antigen binding domain (BD), the polypeptide comprising or consisting of, in N- to C-terminal direction BD-Fc-Td, wherein Fc is an antibody Fc region. In an embodiment, there is provided a dimer of first and second copies of such a polypeptide, wherein the Fc of the first polypeptide is associated with the Fc of the second polypeptide. In an embodiment there is a dimer of such a dimer, eg, as shown in FIG. 12C. Optionally, the BD is a single variable domain (also referred to as a domain antibody or dAb, eg, a nanobody or VHH). Optionally in such a polypeptide, dimer or tetramer BD comprises the amino acid of QB-GB (SEQ ID NO: 307), QB-DD, QB-BG or QB-FE (see Table 23 for sequences).

[1946] In an example, the invention provides a provides polypeptide comprising an antigen binding domain (BD), the polypeptide comprising or consisting of, in N- to C-terminal direction BD-CH1-Fc-Td, wherein Fc is an antibody Fc region. In an embodiment, there is provided a dimer of first and second copies of such a polypeptide, wherein the Fc of the first polypeptide is associated with the Fc of the second polypeptide. In an embodiment there is a dimer of such a dimer, eg, as shown in FIG. 12E Preferably each polypeptide is paired with a further polypeptide, wherein the further polypeptide comprises, in N- to C-terminal direction, BD2-CL, wherein the CH1pairs with the CL. Optionally, the BD is a single variable domain (also referred to as a domain antibody or dAb, eg, a nanobody or VHH). Optionally, the BD2 is a single variable domain (also referred to as a domain antibody or dAb, eg, a nanobody or VHH). In an alternative, BD and BD2 are a VH/VL pair that binds an antigen. The CL of said further polypeptide associates with the CH1 of the other polypeptide (see, eg, FIG. 12E). Optionally in such a polypeptide, dimer or tetramer BD comprises the amino acid of QB-GB (SEQ ID NO: 307), QB-BG or QB-FE (see Table 23 for sequences).

[1947] In an example, the invention provides a provides polypeptide comprising an antigen binding domain (BD), the polypeptide comprising or consisting of, in N- to C-terminal direction BD-CH1-Td, wherein CH1 is an antibody CH1. In an embodiment, there is provided a dimer of first and second copies of such a polypeptide, eg, wherein the TDs of the polypeptides are associated together. In an embodiment there is a dimer of such a dimer, eg, as shown in FIG. 12I Preferably each polypeptide is paired with a further polypeptide, wherein the further polypeptide comprises, in N- to C-terminal direction, BD2-CL, wherein the CH1 pairs with the CL. Optionally, the BD is a single variable domain (also referred to as a domain antibody or dAb, eg, a nanobody or VHH). Optionally, the BD2 is a single variable domain (also referred to as a domain antibody or dAb, eg, a nanobody or VHH). In an alternative, BD and BD2 are a VH/VL pair that binds an antigen. The CL of said further polypeptide associates with the CH1 of the other polypeptide (see, eg, FIG. 12I. Optionally in such a polypeptide, dimer or tetramer BD comprises the amino acid of QB-GB (SEQ ID NO: 307), QB-DD, QB-BG or QB-FE (see Table 23 for sequences).

[1948] BD and BD2 may be a VH/VL pair of an antigen binding site of an antibody selected from the group consisting of REGN10987, REGN10933 and CB6.

[1949] There is also provided:
[1950] A protein multimer comprising 4 copies of an antigen binding site of an antibody, wherein the antibody is selected from REGN10987, REGN10933 and CB6.
[1951] A protein multimer comprising 4 copies of an antigen binding site of an antibody, wherein the multimer comprises a dimer of an antibody or a fragment thereof (eg, a Fab), wherein the antibody is selected from REGN10987, REGN10933 and CB6.
[1952] A protein multimer comprising a dimer of an antibody or a fragment thereof (eg, a Fab), wherein the antibody is selected from REGN10987, REGN10933 and CB6.
[1953] A protein multimer comprising 4 (and optionally no more than 4) copies of Nb-112 (SEQ ID NO: 288).
[1954] A protein multimer comprising 4 (and optionally no more than 4) copies of an antibody variable domain comprising the amino acid sequence SEQ ID NO: 288.
[1955] A protein multimer comprising 8 (and optionally no more than 8) copies of Nb-112 (SEQ ID NO: 288).
[1956] A protein multimer comprising 8 (and optionally no more than 8) copies of an antibody variable domain comprising the amino acid sequence SEQ ID NO: 288.
[1957] A protein multimer comprising 12 (and optionally no more than 12) copies of Nb-112 (SEQ ID NO: 288).
[1958] A protein multimer comprising 12 (and optionally no more than 12) copies of an antibody variable domain comprising the amino acid sequence SEQ ID NO: 288.
[1959] A protein multimer comprising 16 (and optionally no more than 16) copies of Nb-112 (SEQ ID NO: 288).
[1960] A protein multimer comprising 16 (and optionally no more than 16) copies of an antibody variable domain comprising the amino acid sequence SEQ ID NO: 288.
[1961] A protein multimer comprising 20 (and optionally no more than 20) copies of Nb-112 (SEQ ID NO: 288).
[1962] A protein multimer comprising 20 (and optionally no more than 20) copies of an antibody variable domain comprising the amino acid sequence SEQ ID NO: 288.
[1963] A protein multimer comprising 24 (and optionally no more than 24) copies of Nb-112 (SEQ ID NO: 288).
[1964] A protein multimer comprising 24 (and optionally no more than 24) copies of an antibody variable domain comprising the amino acid sequence SEQ ID NO: 288.
[1965] A protein multimer comprising 28 (and optionally no more than 28) copies of Nb-112 (SEQ ID NO: 288).
[1966] A protein multimer comprising 28 (and optionally no more than 28) copies of an antibody variable domain comprising the amino acid sequence SEQ ID NO: 288.
[1967] Instead of an antibody variable domain comprising the amino acid sequence SEQ ID NO: 288, the multimer comprises antibody single variable domain Nb11-59 or an antibody single variable domain comprising SEQ ID NO: 293, or an amino acid sequence that is at least 80, 85, 90, 95, 96, 97, 98 or 99% identical to the amino acid sequence of Nb11-59 or SEQ ID NO: 293. Reference is made to Koenig et al 2021 (Science, 2021 Feb 12;371(6530):eabe6230. doi: 10.1126/science.abe6230. Epub 2021 Jan 12, “Structure-guided multivalent nanobodies block SARS-CoV-2 infection and suppress mutational escape”). Instead of an antibody variable domain comprising the amino acid sequence SEQ ID NO: 288 or Nb11-59, the multimer comprises an antibody single variable domain selected from nanobodies A to W disclosed in Koenig et al, the sequences of which are incorporated in their entirety herein for use in a multimer or polypeptide as described herein. Preferably, the domain is nanobody E, U, V or W.
[1968] In an alternative, each copy of the variable domain comprises an amino acid sequence that is at least 80, 85, 90, 95, 96, 97, 98 or 99% identical to SEQ ID NO: 288, wherein the variable domain is capable of binding to a SARS-CoV-2 antigen, eg, spike.
[1969] In an alternative, each copy of the variable domain is Nb11-59 or an antibody single variable domain comprising SEQ ID NO: 293. Herein, in any part of the disclosure where NB11-59 is mentioned, in an alternative an antibody single variable domain is used wherein the domain comprises a HCDR3 comprising SEQ ID NO: 294.
[1970] Usefully, the invention provides a pharmaceutical composition for inhaled delivery to a patient (eg, a patient suffering from or at risk of SARS-CoV-2 infection), wherein the composition comprises a multimer of the invention. Preferably, the multimer comprises copies of Nb-112 or a variable domain comprising SEQ ID NO: 288. Preferably, the multimer comprises copies of Nb11-59 or an antibody single variable domain comprising SEQ ID NO: 293, or an amino acid sequence that is at least 80, 85, 90, 95, 96, 97, 98 or 99% identical to the amino acid sequence of Nb11-59 or SEQ ID NO: 293. The invention also provides a nebuliser or inhaler device comprising such a composition.
[1971] There is also provided a multimer or composition of the invention for inhaled administration to a human or animal patient for treating or preventing a lung condition.
[1972] There is also provided a multimer or composition of the invention for inhaled administration to a human or animal patient for treating or preventing a SARS-CoV-2 infection.
[1973] There is also provided a multimer or composition of the invention for inhaled administration to a human or animal patient for treating or preventing an inflammatory condition.
[1974] There is also provided a multimer or composition of the invention for inhaled administration to a human or animal patient for treating or preventing pneumonia.
[1975] There is also provided a multimer or composition of the invention for inhaled administration to a human or animal patient for treating or preventing a cough.
[1976] There is also provided a multimer or composition of the invention for inhaled administration to a human or animal patient for treating or preventing loss of smell and/or taste.
[1977] There is also provided a multimer or composition of the invention for inhaled administration to a human or animal patient for treating or preventing an elevated temperature (eg, a temperature greater than 38, 39 or 40° C.entrigrade, eg, 37.8° C.entrigrade or greater).
[1978] There is also provided a multimer or composition of the invention for inhaled administration to a human or animal patient for treating or preventing COVID or a symptom thereof.
[1979] Advantageously, the multimer may comprise mammalian cell glycosylation. The multimer may, for example, comprise 8, 12, 16, 20 or 24 copies of the binding site (eg, VHH). The multimer may contain 4 (but no more than 4) copies of the binding site (eg, VHH). The binding site may be anti-SARS-CoV-2 antigen VH/VL pair comprised by the antibody.

[1980] Advantageously, as shown in Example 33, a VH or VHH herein may be a VH3 family VH or VHH. As shown in the example, multimerization of such a variable domain can surprisingly produce a multimer of the invention that can be readily purified by binding to protein A. Thus, preferably, the multimer can be devoid of an affinity tag, such as a His tag.

[1981] Herein, any Fc may be a human antibody Fc. Herein, an Fc may be a gamma antibody Fc, mu antibody Fc, delta antibody Fc, epsilon antibody Fc or alpha antibody Fc, preferably a gamma (eg, gamma-1, gamma-2, gamma-3 or gamma-4) antibody Fc (preferably a gamma-1 antibody Fc).

[1982] Optionally, the invention provides a protein multimer comprising the configuration of ACE2-TD shown in FIG. 54B. The multimer may comprise further moieties, such as protein domains or peptides than are shown in the figure.

[1983] Optionally, the invention provides a protein multimer comprising the configuration of ACE2 monomeric Ig-TD shown in FIG. 54C. The multimer may comprise further moieties, such as protein domains or peptides than are shown in the figure.

[1984] Optionally, the invention provides a protein multimer comprising the configuration of ACE2 dimer-TD shown in FIG. 54D. The multimer may comprise further moieties, such as protein domains or peptides than are shown in the figure.

[1985] Optionally, the invention provides a protein multimer comprising the configuration of ACE2- Ig-TD shown in FIG. 54E. The multimer may comprise further moieties, such as protein domains or peptides than are shown in the figure.

[1986] Optionally, the invention provides a protein multimer comprising the configuration of BD-Heavy Chain Only -TD shown in FIG. 55C. The multimer may comprise further moieties, such as protein domains or peptides than are shown in the figure.

[1987] Optionally, the invention provides a protein multimer comprising the configuration of BD-Ig-TD shown in FIG. 55B. The multimer may comprise further moieties, such as protein domains or peptides than are shown in the figure.

[1988] Optionally, the invention provides a protein multimer comprising the configuration of BD-Fab-like -TD shown in FIG. 55B. The multimer may comprise further moieties, such as protein domains or peptides than are shown in the figure.

[1989] Optionally, the invention provides a protein multimer comprising the configuration of BD-Fab-like monomeric Ig-TD shown in FIG. 55E. The multimer may comprise further moieties, such as protein domains or peptides than are shown in the figure.

[1990] Optionally, the invention provides a protein multimer comprising the configuration of Dimeric-TD shown in FIG. 55H. The multimer may comprise further moieties, such as protein domains or peptides than are shown in the figure.

[1991] Optionally, the invention provides a protein multimer comprising the configuration of BD-Fab′-like -TD shown in FIG. 55F. The multimer may comprise further moieties, such as protein domains or peptides than are shown in the figure.

[1992] Optionally, the invention provides a protein multimer comprising the configuration of BD-monomeric Ig-TD shown in FIG. 55G. The multimer may comprise further moieties, such as protein domains or peptides than are shown in the figure.

[1993] Optionally, BD-TD denotes the binding domain directly linked N-terminal to the TD.

[1994] Optionally, TD-BD denotes the binding domain directly linked C-terminal to the TD.

[1995] Optionally, BD-BD denotes the binding domains directly linked to each other.

[1996] Optionally, 2 copies of the polypeptide are associated or joined together so that the N- and C-termini of each polypeptide is not directly joined to the other polypeptide to form a polypeptide dimer (eg, see FIGS. 54D or 55C). For example, the polypeptides of the dimer are disulphide bonded to each other. For example, Fc dimerisation between 2 copies of the polypeptide produce a dimer, wherein the polypeptide comprises an antibody Fc. The invention, in an embodiment, provides a multimer (ie, tetramer) comprising 2 identical copies of the dimer (ie, comprising 4 copies of the polypeptide), wherein the multimer comprises at least 4 copies of BD. For example, each polyeptide has only one BD, wherein the multimer has 4 copies of BD. In another example, each polyeptide has only 2 copies of BD, wherein the multimer has 8 copies of BD. In another example, each polyeptide has only 3 copies of BD, wherein the multimer has 12 copies of BD.

[1997] The BD or binding domain herein may be a binding domain disclosed in Table 23, eg, QB-GB, QB-BG or QB-FE (see Table 23 for sequences), or as disclosed in Table 32. The VH/VL pair may be a VH/VL pair of antibody CR3022: CR3022 VH (ie, QMQLVQSGTEVKKPGESLKISCKGSGYGFITYWIGWVRQMPGKGLEWMGIIYPGDSETR YSPSFQGQVTISADKSINTAYLQWSSLKASDTAIYYCAGGSGISTPMDVWGQGTTVTV) paired with CR3022 VL (ie, DIQLTQSPDSLAVSLGERATINCKSSQSVLYSSINKNYLAWYQQKPGQPPKLLIYWASTRE SGVPDRFSGSGSGTDFTLTISSLQAEDVAVYYCQQYYSTPYTFGQGTKVEIK).

[1998] In an alternative, instead of BD, the polypeptide comprises or contains a peptide (eg, an insulin peptide or a superantigen peptide or domain) or a receptor (eg, ACE2 ECD). See, eg, FIG. 54C. Exemplary superantigens (eg protein G, A or L) and peptides and domains thereof are disclosed herein.

[1999] The invention comprises a multimer (eg, a multimer described elsewhere herein) comprising 4 copies of a binding domain or a peptide. For example, the binding domain may be any binding domain disclosed herein.

[2000] The invention comprises a multimer (eg, a multimer described elsewhere herein) comprising 8 copies of a binding domain or a peptide. For example, the binding domain may be any binding domain disclosed herein.

[2001] The invention comprises a multimer (eg, a multimer described elsewhere herein) comprising 16 copies of a binding domain or a peptide. For example, the binding domain may be any binding domain disclosed herein.

[2002] The invention comprises a multimer (eg, a multimer described elsewhere herein) comprising 20 copies of a binding domain or a peptide. For example, the binding domain may be any binding domain disclosed herein.

[2003] The invention comprises a multimer (eg, a multimer described elsewhere herein) comprising 24 copies of a binding domain or a peptide. For example, the binding domain may be any binding domain disclosed herein.

[2004] Herein, by “comprising” said number of copies of the binding domain or peptide, the multimer may, for example, comprise no more than said number of the domain or peptide. For example, the multimer may contain exactly said number of copies of the binding domain or peptide.

[2005] The invention comprises a multimer (eg, a multimer described elsewhere herein) comprising 4 copies of a first binding domain or a peptide; and 4 copies of a second binding domain or a peptide, wherein the first and second binding domains are different (eg, they bind to different antigens of a virus, eg, a coronavirus or HIV or influenza, or immune checkpoint antigens, or cytokine antigens, or growth factor antigens, or venom (eg, snake venom) antigens). For example, the first binding domain may be any binding domain disclosed herein. For example, the second binding domain may be any binding domain disclosed herein.

[2006] The invention comprises a multimer (eg, a multimer described elsewhere herein) comprising 4 or 8 copies of a first binding domain or a peptide; and 4 copies of a second binding domain or a peptide, wherein the first and second binding domains are different (eg, they bind to different antigens of a virus, eg, a coronavirus or HIV or influenza, or immune checkpoint antigens, or cytokine antigens, or growth factor antigens, or venom (eg, snake venom) antigens). For example, the first binding domain may be any binding domain disclosed herein. For example, the second binding domain may be any binding domain disclosed herein.

[2007] The invention comprises a multimer (eg, a multimer described elsewhere herein) comprising 4 or 8 copies of a first binding domain or a peptide; and 8 copies of a second binding domain or a peptide, wherein the first and second binding domains are different (eg, they bind to different antigens of a virus, eg, a coronavirus or HIV or influenza, or immune checkpoint antigens, or cytokine antigens, or growth factor antigens, or venom (eg, snake venom) antigens). For example, the first binding domain may be any binding domain disclosed herein. For example, the second binding domain may be any binding domain disclosed herein.

[2008] The invention comprises a multimer (eg, a multimer described elsewhere herein) comprising 4 copies of a first binding domain or a peptide; 4 copies of a second binding domain or a peptide; and 4 copies of a third binding domain or a peptide, wherein the first, seond and third binding domains are different from each other (eg, they bind to different antigens of a virus, eg, a coronavirus or HIV or influenza, or immune checkpoint antigens, or cytokine antigens, or growth factor antigens, or venom (eg, snake venom) antigens). For example, the first binding domain may be any binding domain disclosed herein. For example, the second binding domain may be any binding domain disclosed herein. For example, the third binding domain may be any binding domain disclosed herein.

[2009] The invention comprises a multimer (eg, a multimer described elsewhere herein) comprising 4 copies of a first binding domain or a peptide; 4 copies of a second binding domain or a peptide; 4 copies of a third binding domain or a peptide; and 4 copies of a fourth binding domain or a peptide, wherein the first, second, third and fourth binding domains are different from each other (eg, they bind to different antigens of a virus, eg, a coronavirus or HIV or influenza, or immune checkpoint antigens, or cytokine antigens, or growth factor antigens, or venom (eg, snake venom) antigens). For example, the first binding domain may be any binding domain disclosed herein. For example, the second binding domain may be any binding domain disclosed herein. For example, the third binding domain may be any binding domain disclosed herein. For example, the fourth binding domain may be any binding domain disclosed herein.

[2010] Optionally, the multimer comprises said number of first and second binding domains. Optionally, the multimer comprises said number of first and second peptides.

[2011] Optionally, the multimer comprises mammalian cell (eg, human cell) glycosylation.

[2012] Optionally, the multimer binds to the antigen with an affinity of less than 200, 150, 100, 90, 80, 70, 60, 50, 40, 35, 30, 25, 20, 15 or 10 pM (preferably less than 40 or 20 pM) in an ELISA assay, such as an ELISA assy disclosed herein. Optionally, the multimer binds to the antigen with an affinity of less than 200, 150, 100, 90, 80, 70, 60, 50, 40, 35, 30, 25, 20, 15 or 10 pM (preferably less than 40 or 20 pM) in an SPR assay, such as an SPR assy disclosed herein. In an embodiment of these options, the multimer comprises or contains 16 copies of a binding domain or peptide.

[2013] Optionally, the multimer neutralises the antigen with an IC₅₀ of less than 0.2, 0.1, 0.09, 0.08, 0.07, 0.06, 0.05, 0.04, 0.03, 0.02 or 0.01 nM (preferably from 0.06 to 0.01 nM) in an ELISA assay, such as an ELISA assay disclosed herein. Optionally, the multimer neutralises the antigen with an IC₅₀ of less than 0.2, 0.1, 0.09, 0.08, 0.07, 0.06, 0.05, 0.04, 0.03, 0.02 or 0.01 nM (preferably from 0.06 to 0.01 nM) in an SPR assay, such as an SPR assay disclosed herein. In an embodiment of these options, the multimer comprises or contains 16 copies of a binding domain or peptide.

[2014] In an embodiment, the multimer comprises anti-coronavirus (eg, SARS-Cov-2) spike protein binding sites or receptor peptides, wherein the multimer binds to spike trimer or spike RBD. For example, the binding is with an affinity of less than 200, 150, 100, 90, 80, 70, 60, 50, 40, 35, 30, 25, 20, 15 or 10 pM (preferably less than 40 or 20 pM) in an SPR assay, such as an SPR assay disclosed herein; or in an ELISA assay, such as an ELISA assay disclosed herein (eg, an assay as disclosed in Example 28). See, eg, Example 28.

[2015] An antigen binding domain or site comprised by a polypeptide or multimer of the invention may be any binding domain or binding site selected from those disclosed herein (eg, any VH, VL, dAb, VHH or scFv) or may be a binding domain or binding site that comprises an amino acid sequence that is at least 70, 80, 85, 90, 95, 96, 97, 98 or 99% identical to the amino acid sequence of said selected domain or site.

[2016] An antigen binding domain or site comprised by a polypeptide or multimer of the invention may be any binding domain or binding site selected from those disclosed herein (eg, any VH, VL, dAb, VHH or scFv) or may be a binding domain or binding site that comprises an amino acid sequence that is identical to the amino acid sequence of said selected domain or site except for 10, 9, 8, 7, 6, 5, 4, 3, 2, or 1 amino acid differences (eg, conseravative amino acid changes).

[2017] An antigen binding domain or site comprised by a polypeptide or multimer of the invention may be a domain or site that competes with any binding domain or binding site selected from those disclosed herein (eg, any VH, VL, dAb, VHH or scFv) for binding to the antigen. Competition may be determined by a standard competition assay, such as an SPR competition assay or an ELISA assay.

[2018] A polypeptide of the invention may have a configuration shown for a polypeptide in any of the figures herein. A multimer (eg, polyeptide dimer or tetramer) of the invention may have a configuration shown for a multimer in any of the figures herein.

[2019] In a configuration, the invention provides:
[2020] A protein multimer comprising or containing 8 copies of a peptide or an antigen binding site, (optionally wherein the antigen is a virus spike protein of a first virus, optionally wherein the multimer is capable of binding to the first and a second virus, wherein the viruses are different).
[2021] The term “comprising” is open language wherein more than 8 copies of the peptide or binding site are possible in embodiments of the multimer. The term “containing” is closed language wherein 8 (but not more or less than 8) copies are present in the multimer. The term “comprising or containing” or “comprises or contains” herein is to be construed accordingly.

[2022] In an alternative, the multimer comprises or contains 3, 4, 5, 6, 7, 8, 9, 10, 11, 12, 13, 14, 15, 16, 17, 18, 19, 20, 21, 22, 23, 24, 25, 26, 27, 28, 29, 30, 31, 32, 33, 34, 35 or 36 copies of the peptide or binding site. Preferably, the multimer comprises or contains 4, 8, 12, 16, 20, 24, 28, 32 or 36 copies of the peptide or binding site. For example, the binding site is a VH/VL pair comprising VH-ICC paired with VL-ICC or VH-IHG paired with VL-IHG. For example, the binding site comprises QB-GB, QB-DD, QB-BG or QB-FE.

[2023] Optionally, the multimer comprises or contains 16 copies of the peptide or binding site.

[2024] Optionally, the multimer comprises (i) 4 copies of a polypeptide, wherein each polypeptide copy comprises a tetramerization domain and 2 or more (eg, 2, 3 or 4) copies of the peptide or binding site; or (ii) 4 copies of a dimer of a polypeptide, wherein each polypeptide copy comprises a tetramerization domain and 1 or more (eg, 2) copies of the peptide or binding site.

[2025] Optionally, the polypeptide comprises a self-assembly multimerization domain (SAM) (preferably a tetramerization domain (TD)) and one or more copies of an antigen binding site (BD), the polypeptide comprising or consisting of, in N- to C-terminal direction
[2026] BD-TD;
[2027] TD-BD;
[2028] BD-BD-TD;
[2029] TD-BD-BD;
[2030] BD-TD-BD-BD;
[2031] BD-BD-TD-BD; or
[2032] BD-BD-TD-BD-BD.

[2033] Optionally, the BD is a single variable domain.

[2034] Optionally, the BD comprises the amino acid sequence of QB-GB (SEQ ID NO: 307), QB-DD, QB-BG or QB-FE.

[2035] Optionally, the polypeptide comprises, in N- to C-terminal direction, BD-CH1-TD, BD-CL-TD, BD-CH1-Fc-TD or BD-Fc-TD, where BD is an antibody V domain (eg, a VH), Fc is an antibody Fc region, and CH1 is an antibody CH1 domain; and optionally each BD-CH1-TD or BD-CH1-Fc-TD polypeptide of the multimer is paired with a respective second polypeptide, wherein the second polypeptide comprises, in N- to C-terminal direction BD2-CL, wherein BD2 is an antibody V domain (eg, a VL or single variable domain), wherein the CH1 pairs with the CL.

[2036] In an example, tandam dAbs are provided N-termial to the TD, preferably at the N-terminus of the polypeptide. For example the polypeptide comprises, in N- to C-terminal direction, BD′-optionaly linker-BD-CH1-TD, BD′-optionaly linker-BD -CL-TD, BD′-optionaly linker-BD -CH1-Fc-TD or BD′-optionaly linker-BD -Fc-TD, wherein each of BD and BD′ is an antibody single variable domain (eg, a nanobody), Fc is an antibody Fc region, and CH1 is an antibody CH1 domain. BD′ and BD may be the same or different (eg, comprising different antigen specificities).

[2037] In an example, the dimer comprises a first polypeptide comprising, in N- to C-terminal direction, BD-hinge-TD; BD′-optional linker-BD-Hinge-TD; or BD-optional linker-CH1-Hinge-TD. Optionally the first polypeptide is associated with a second polypeptide. In an embodiment, the second polypeptide comprises, in N- to C-terminal direction, BD″-optional Linker 1-BD-optional linker 2-CL (kappa or lambda) (eg, BD″- Linker 1-BD-optional linker 2-CL; BD″-BD-optional linker-CL; or BD″-BD-CL), wherein the first polyeptide comprises a CH1 domain that is paired with the CL, and wherein each of BD and BD′ is an antibody single variable domain (eg, a nanobody).

[2038] Optionally, (i) each of BD and BD2 is an antibody single variable domain; or (ii) BD1 is an antibody VH domain and BD2 is an antibody VL domain, wherein the VH and VL form a VH/VL pair comprising an antigen binding site.

[2039] Optionally, the polypeptide comprises, in N- to C-terminal direction, BD-CH1-Fc-TD or BD-CH1-Linker-Fc-TD (optionally wherein the Linker is an antibody hinge, wherein the hinge is devoid of a core hinge region).

[2040] In configuration, the invention further provides:-
[2041] A protein dimer containing 2 copies of the polypeptide.
[2042] A protein dimer containing 2 copies of a polypeptide as described herein.
[2043] A protein dimer comprising first and second polypeptides, wherein each polypeptide is a polypeptide disclosed herein.
[2044] A 4-chain multimer (eg, an antibody) comprising a dimer of the invention, wherein a first polypeptide of the dimer is associated with a second polypeptide of the dimer, wherein a third polypeptide is associated with the first polypeptide and a fourth polypeptide is associated with the second polypeptide. For example, the first and second polypeptides are antibody heavy chains and the third and fourth polypeptides are light chains. For example, the first and third polypetides are associated together and comprise a first antigen binding site that is capable of binding to a first antigen; and the second and fourth polypeptides are associated together and comprise a second antigen binding site that is capable of binding to a second antigen. Optionally, the first and second antigens are different. Optionally, the first and second binding sites are different. For example, each binding site comprises a VH/VL pair. For example, the first and third polypeptides comprise first and second single variable domains, wherein each single variable domain is capable of binding a respective antigen (eg, different antigens) and/or (i) the second and fourth polypeptides comprise third and fourth single variable domains, wherein each single variable domain is capable of binding a respective antigen (eg, different antigens) or (ii) the second and fourth polypeptides are associated together and comprise a VH/VL pair that is capable of binding to an antigen.
[2045] Optionally, a multimer herein is multispecific for antigen binding, eg, bispecific, trispecific or tetraspecific.
[2046] The polypeptides are associated together, eg, a Fc region of a first polypeptide of the dimer is associated with a Fc of a second polypeptide of the dimer. In an example, each polypeptide comprises a TD.

[2047] Optionally, the (or the first) polypeptide comprises, in N- to C-terminal direction, BD-TD.

[2048] Optionally, the 2 copies of the polypeptide are disulphide bonded together in the dimer.

[2049] The invention also provides:

[2050] A protein dimer containing 2 copies of a polypeptide recited herein, wherein the polypeptide comprises BD-CH1-Fc-TD, wherein the Fc regions of the polypeptides associate with each other to form the dimer.

[2051] The invention also provides:

[2052] A multimer comprising or containing 4 copies of the dimer of the invention.

[2053] The invention also provides:

[2054] A polypeptide as recited for the multimer or dimer of the invention.

[2055] Optionally, the polypeptide is isolated or recombinant.

[2056] The multimer, dimer or polypeptide may be comprised by a medical or sterile container, eg, a syringe, vial, IV bag, container connected to a needle or a subcutaneous injection administration device.

[2057] Optionally, the antigen is a viral antigen, bacterial antigen, fungal antigen, toxin antigen, venom antigen, immune checkpoint protein antigen, cytokine antigen, growth factor antigen, hormone antigen (eg, chorionic gonadotropin), sugar antigen, lipid antigen or protein antigen.

[2058] Optionally, BD and BD2 are different from each other and each comprises a binding site for an antigen of a virus, an antigen of a bacterium, an antigen of a fungus, an antigen of a toxin, an antigen of a venom, an antigen of an immune checkpoint protein, an antigen of a cytokine, an antigen of a growth factor antigen or an antigen of a hormone; optionally wherein both BD and B2 comprises a binding site for a virus.

[2059] Optionally, the multimer binds to the antigen with an affinity of less than 200 pM in an ELISA assay; and/or the multimer neutralises the antigen with an IC₅₀ of less than 0.2 nM in an ELISA assay.

[2060] Optionally, the multimer is capable of detectably binding to anti-first antigen antibodies (optionally anti-SARS-Cov-2 spike antibodies) in an ELISA assay, wherein detection of the multimer binding is measured by OD₄₅₀ and the assay comprises
[2061] (a) Diluting a serum sample of a mammal between 100 and 10⁶-fold;
[2062] (b) Contacting the antigen (eg, SARS-Cov-2 spike protein) with the serum sample (which has been diluted in step (a)) whereby anti-first antigen (eg, anti-SARS-Cov-2 spike) antibodies present in the sample bind to the antigen (eg, spike protein), wherein the antigen protein is immobilised on a solid surface;
[2063] (c) Contacting the bound antibodies with copies of the multimer of any preceding claim and
[2064] (d) Detecting multimer bound to antibody.

[2065] Optionally, the dilution is 1000 to 1,000,000, 100,000 or 10000-fold (preferably 10,000 to 100,000-fold).

[2066] The invention provides:

[2067] A method of detecting the presence of anti-first antigen antibodies (eg, anti-SARS-Cov-2 spike antibodies) in a bodily fluid sample of a human or animal, the method comprising carrying out an ELISA assay, and the assay comprises
[2068] (a) Optionally diluting the serum sample from 10 to 10⁶-fold;
[2069] (b) contacting the first antigen (eg, SARS-Cov-2 spike protein) with the sample (optionally which has been diluted in step (a)) whereby anti-first antigen (eg, anti-SARS-Cov-2 spike) antibodies present in the sample bind to the first antigen (eg, spike protein) to produce antigen/antibody complexes; and
[2070] (c) contacting and binding the first antigen or anti-first antigen (eg, anti-SARS-Cov-2 spike) antibodies with copies of the multimer of any one of claims 1 to 9, 14 and 16 to 19 and
[2071] (d) detecting multimer bound to antigen/antibody complexes, the detecting optionally comprising detection of the multimer binding by determining optical density, such as OD₄₅₀;
[2072] (e) wherein the steps can be carried out in the order (a) (b) (c) and (d) or (a) (c) (b) and (d), or wherein steps (b) and (c) are carried out simultaneously and between steps (a) and (d).

[2073] Optionally, the presence of anti-first antigen antibodies in the sample is detected when the optical density (eg, OD₄₅₀) is greater than 0.1 or 0.5 (optionally, greater than 1, 1.5 or 2) in the assay. Optionally, the dilution is 1000 to 1,000,000, 100,000 or 10000-fold (preferably 10,000 to 100,000-fold).

[2074] Optionally, the binding site is
[2075] (a) QB-GB, QB-DD, QB-FE or QB-BG;
[2076] (b) The spike protein binding site of an antibody selected from 80R, CR3014, CR3006, CR3013 and CR3022;
[2077] (c) An anti-SARS-Cov-2 antigen binding site of an antibody selected from REGN10987, REGN10933, CB6, rRBD-15, B38, H4, FYB-207, ABP300, BRII-198, BRII-196, CT-P59, HFB-3013, HFB30132A, MW33, SAB-185, Etesevimab, SCTA01, H014, STI-1499, COVI-GUARD™, TY027, COVI-AMG™, STI-2020, HLX70, ADM03820, an XAV-19 antibody, BGB DXP-593, DXP-604, VIR-7831, GSK4182136, AZD8895, AZD1061, HBM9022, 47D11, Ab8, MAbCo19, AR-701, AR-711, DXP-604, Centi-B9, GIGA-2050, TATX-03, TATX-06, TATX-09, TATX-13, TATX-16, NOVOAB-20, COVI-SHIELD™, STI-4920, ACE-MAB, CMAB020, IDB003 and VIR-7832;
[2078] (d) A viral antigen binding site of an antibody selected from the antibodies of Table 21;
[2079] (e) A viral antigen binding site disclosed in Table 23 or Table 32;
[2080] (f)An ACE2 protein which is capable of binding to the first virus spike protein;
[2081] (g) An ACE2 protein disclosed in Table 24;
[2082] (h) A TMPRSS2 protein which is capable of binding to the first virus spike protein;
[2083] (i) Protein G or a fragment thereof;
[2084] (j) Protein A or a fragment thereof;
[2085] (k) Protein L or a fragment thereof;
[2086] (l) an Ig binding domain disclosed herein (eg, as disclosed in Table 25);
[2087] (m) an antibody VH/VL pair, wherein the VH comprises an amino acid sequence selected from a VH sequence disclosed herein and the VL comprises an amino acid sequence selected from a respective VL sequence disclosed herein (optionally wherein the VH is encoded by the DNA sequence of VH-ICC or VH-IHG and the VL is encoded by the DNA sequence of VL-ICC or VL-IHG respectively);
[2088] (n) an antibody single variable domain comprising the amino acid sequence of SEQ ID NO: 288 or an amino acid sequence that is at least 80% (eg, at least 80, 85, 90, 95, 96, 97, 98 or 99%) identical to SEQ ID NO: 288; or
[2089] (o) antibody single variable domain Nb11-59 or or an antibody single variable domains comprising SEQ ID NO: 203, or an antibody single variable domain comprising amino acid sequence that is at least 80, 85, 90, 95, 96, 97, 98 or 99% identical to the amino acid sequence of Nb11-59 or SEQ ID NO: 293.

[2090] Optionally, the multimers are immobilised on a solid surface; or the first antigen is immobilised on a solid surface.

[2091] Optionally, determining optical density (eg, OD₄₅₀) comprises labelling complexes comprising spike protein and multimers with horseradish peroxidase (HRP) and detecting the label (eg, at a wavelength of 450 nm).

[2092] For the multimer, dimer, polypeptide or method, each multimer may comprise a polypeptide; or variable domain or binding site amino acid disclosed herein.

[2093] The invention provides:

[2094] A multimer comprising 4 copies of a binding site for an antigen, wherein the multimer comprises a dimer of an antibody or a dimer of an antigen binding fragment (eg, Fab) of an antibody, optionally wherein the multimer is according to any preceding claim. The antibody can be any antibody disclosed herein, eg, an antibody selected from REGN10987, REGN10933, CB6, rRBD-15, B38, H4, FYB-207, ABP300, BRII-198, BRII-196, CT-P59, HFB-3013, HFB30132A, MW33, SAB-185, Etesevimab, SCTA01, H014, STI-1499, COVI-GUARD™, TY027, COVI-AMG™, STI-2020, HLX70, ADM03820, an XAV-19 antibody, BGB DXP-593, DXP-604, VIR-7831, GSK4182136, AZD8895, AZD1061, HBM9022, 47D11, Ab8, MAbCo19, AR-701, AR-711, DXP-604, Centi-B9, GIGA-2050, TATX-03, TATX-06, TATX-09, TATX-13, TATX-16, NOVOAB-20, COVI-SHIELD™, STI-4920, ACE-MAB, CMAB020, IDB003 and VIR-7832.

[2095] The multimer may be a tetramer having a configuration shown in the right-hand-side schematic of any one of FIGS. 14C, 14-D, 15-I, 15-J and 16-A to 16-C(eg, FIGS. 16A, 16B or 16C, optionally wherein the VH and VL pair is a VH/VL pair of an antigen binding site of an antibody selected from the group consisting of REGN10987, REGN10933 and CB6); or wherein the polypeptdide herein may be a polypeptide having a configuration shown in the middle schematic of any one of FIGS. 14C, 14-D, 15-I, 15-J and 16-A to 16-C; or the dimer may be a dimer of any such polypeptide. The multimer may be a tetramer having a configuration shown in the right-hand-side schematic of FIGS. 62A or 62B.

[2096] Optionally,
[2097] (a) the multimer is a tetramer having a configuration shown in the right-hand-side schematic of any one of FIGS. 14C, 14-D, 15-I, 15-J and 16-A to 16-C(eg, FIGS. 16A, 16B or 16C, optionally wherein the VH and VL pair is a VH/VL pair of an antigen binding site of an antibody selected from the group consisting of REGN10987, REGN10933 and CB6); or wherein the polypeptdide is a polypeptide having a configuration shown in the middle schematic of any one of FIGS. 14C, 14-D, 15-I, 15-J and 16-A to 16-C; or the dimer is a dimer of any such polypeptide; optionally wherein each VH and each VL is a VH and VL of an antigen binding site of an antibody selected from the group consisting of REGN10987, REGN10933 and CB6;
[2098] (b) the multimer is a tetramer of 4 copies of a polypeptide, wherein each polypeptide comprises an amino acid sequence selected from SEQ ID NOs: 232, 233, 234, 235, 236, 237, 238 (optionally wherein the polypeptide is paired with a polypeptide comprising SEQ ID NO: 240), 239 (optionally wherein the polypeptide is paired with a polypeptide comprising SEQ ID NO: 287), 241, 242, 243, 244, 245 (optionally wherein the polypeptide is paired with a polypeptide comprising SEQ ID NO: 240 or 286), 246 (optionally wherein the polypeptide is paired with a polypeptide comprising SEQ ID NO: 240), 247 (optionally wherein the polypeptide is paired with a polypeptide comprising SEQ ID NO: 287), 248 (optionally wherein the polypeptide is paired with a polypeptide comprising SEQ ID NO: 240), 249 (optionally wherein the polypeptide is paired with a polypeptide comprising SEQ ID NO: 287), 250 (optionally wherein the polypeptide is paired with a polypeptide comprising SEQ ID NO: 253), 251 (optionally wherein the polypeptide is paired with a polypeptide comprising SEQ ID NO: 253), 252 (optionally wherein the polypeptide is paired with a polypeptide comprising SEQ ID NO: 253), 254 (optionally wherein the polypeptide is paired with a polypeptide comprising SEQ ID NO: 257), 255 (optionally wherein the polypeptide is paired with a polypeptide comprising SEQ ID NO: 257), 256 (optionally wherein the polypeptide is paired with a polypeptide comprising SEQ ID NO: 257), 258 (optionally wherein the polypeptide is paired with a polypeptide comprising SEQ ID NO: 261), 259 (optionally wherein the polypeptide is paired with a polypeptide comprising SEQ ID NO: 261) and 260 (optionally wherein the polypeptide is paired with a polypeptide comprising SEQ ID NO: 261);
[2099] (c) the multimer comprises 4 copies of an antigen binding site, wherein the binding site comprises a VH/VL pair, wherein the VH and VL are respectively encoded by the nucleotide sequences of SEQ ID NOs: 268 and 269, 270 and 271, 272 and 273, 274 and 275, 276 and 277, 278 and 279, 280 and 281, 282 and 283, or 284 and 285; the polypeptide comprises a copy of such a binding site; or the dimer comprises 2 copies of such a binding site; or
[2100] (d) wherein the multimer comprises 4 copies of an antigen binding site, wherein the binding site comprises a VH/VL pair, wherein the VH and VL respectively comprise the amino acid sequences of SEQ ID NOs: 262 and 263, 264 and 265, or 266 and 267; the polypeptide comprises a copy of such a binding site; or the dimer comprises 2 copies of such a binding site.

[2101] The invention provides:

[2102] A pharmaceutical composition or assay reagent comprising a plurality of multimers of the invention, optionally wherein the reagent comprises said multimers immobilised on a solid support.

[2103] A multimer of the invention (or a combination of at least 2 or 3 multimers of the invention claim) for administration to a human or animal subject for medical use.

[2104] There is provided a composition comprising a multimer of the invention, eg, for medical use or for use in vitro.

[2105] A VH herein may be a VH encoded by a VH DNA sequence shown in Table 21(b) and a VL herein may be a VL encoded by the cognate VL DNA sequence shown in Table 21(b), wherein the VH and VL form an antigen binding VH/VL pair (eg, that is capable of binding to a SARS-CoV-2 antigen, such as spike antigen). Alternatively, the VH sequence is at least 70, 75, 80, 85, 90, 95, 96, 97, 98 or 99% identical to said VH DNA sequence; and/or the VL sequence is at least 70, 75, 80, 85, 90, 95, 96, 97, 98 or 99% identical to said VL DNA sequence. In an example, the VH DNA sequence is VH-ICC (see Table 21(b)) or a VH sequence that is at least 70, 75, 80, 85, 90, 95, 96, 97, 98 or 99% identical to said VH-ICC DNA sequence; and the VL DNA sequence is VL-ICC (see Table 21(b)) or a VL sequence that is at least 70, 75, 80, 85, 90, 95, 96, 97, 98 or 99% identical to said VL-ICC DNA sequence. In an example, the VH DNA sequence is VH-IHG (see Table 21(b)) or a VH sequence that is at least 70, 75, 80, 85, 90, 95, 96, 97, 98 or 99% identical to said VH-IHG DNA sequence; and the VL DNA sequence is VL-IHG (see Table 21(b)) or a VL sequence that is at least 70, 75, 80, 85, 90, 95, 96, 97, 98 or 99% identical to said VL-IHG DNA sequence.

[2106] A VH herein may comprise the amino acid sequence of SEQ ID NO: 288 or an amino acid sequence that is at least 80, 85, 90, 95, 96, 97, 98 or 99% identical to SEQ ID NO: 288. Preferably, such a VH is unpaired with a second variable domain (eg, a VL), since the VH in this instance is a single variable domain, it is able to bind to a SARS-Cov-2 antigen (eg, spike) without requirement for pairing.

[2107] A VH herein may comprise antibody single variable domain Nb11-59 (Novamab Biopharmaceuticals Co. Ltd) or an antibody single variable domain of ALX-0171 (Ablynx). A VH herein may comprise antibody single variable domain comprising SEQ ID NO: 203, or an antibody single variable domain comprising amino acid sequence that is at least 80, 85, 90, 95, 96, 97, 98 or 99% identical to the amino acid sequence of Nb11-59 or SEQ ID NO: 293.

[2108] Optionally, the combination comprises first and second multimers of the invention, wherein the first multimer comprises a binding site comprising a first VH/VL pair and the second multimer comprises a second VH/VL pair which is different from the first VH/VL pair. In an example, the VH of the first VH/VL pair is encoded by the DNA sequence of VH-ICC and the VL is encoded by the DNA sequence of VL-ICC. In an example, the VH of the first VH/VL pair is encoded by the DNA sequence of VH-IHG and the VL is encoded by the DNA sequence of VL-IHG.

[2109] In an example, the VH of the first VH/VL pair is encoded by a DNA sequence that is at least 70, 75, 80, 85, 90, 95, 96, 97, 98 or 99% identical (or 100% identical) to the DNA sequence of VH-ICC and the VL is encoded by a DNA sequence that is at least 70, 75, 80, 85, 90, 95, 96, 97, 98 or 99% identical (or 100% identical) to the DNA sequence of VL-ICC. In an example, the VH of the first VH/VL pair is encoded by the DNA sequence that is at least 70, 75, 80, 85, 90, 95, 96, 97, 98 or 99% identical (or 100% identical) to the DNA sequence of VH-IHG and the VL is encoded by the DNA sequence that is at least 70, 75, 80, 85, 90, 95, 96, 97, 98 or 99% identical (or 100% identical) to the DNA sequence of VL-IHG.

[2110] Optionally, the multimer comprises first and second antigen binding sites which are different from each other. For example, the first binding site comprises a first VH/VL pair and the second binding site comprises a second VH/VL pair. In an example, the VH of the first VH/VL pair is encoded by a DNA sequence that is at least 70, 75, 80, 85, 90, 95, 96, 97, 98 or 99% identical (or 100% identical) to a first VH DNA sequence disclosed in Table 21(b) and the VL is encoded by a DNA sequence that is at least 70, 75, 80, 85, 90, 95, 96, 97, 98 or 99% identical (or 100% identical) to the cognate VL DNA sequence disclosed in Table 21(b); and the VH of the second VH/VL pair is encoded by a DNA sequence that is at least 70, 75, 80, 85, 90, 95, 96, 97, 98 or 99% identical (or 100% identical) to a second VH DNA sequence disclosed in Table 21(b) and the VL is encoded by a DNA sequence that is at least 70, 75, 80, 85, 90, 95, 96, 97, 98 or 99% identical (or 100% identical) to the cognate VL DNA sequence disclosed in Table 21(b), wherein the first and second VH DNA sequences are different. For example, the first VH DNA sequence is the sequence of VH-IHI (see Table 21(b)), the cognate VH DNA sequence is VL-IHI; and the second VH DNA sequence is the sequence of VH-IHG, VH-ICC, VH-ICD, VH-IGG, VH-IFD, VH-IED, VH-IHD or VH-IHF. For example, the first VH DNA sequence is the sequence of VH-IHG (see Table 21(b)), the cognate VH DNA sequence is VL-IHG; and the second VH DNA sequence is the sequence of VH-IHI, VH-ICC, VH-ICD, VH-IGG, VH-IFD, VH-IED, VH-IHD or VH-IHF. For example, the first VH DNA sequence is the sequence of VH-ICC (see Table 21(b)), the cognate VH DNA sequence is VL-ICC; and the second VH DNA sequence is the sequence of VH-IHG, VH-IHQ, VH-ICD, VH-IGG, VH-IFD, VH-IED, VH-IHD or VH-IHF. For example, the first VH DNA sequence is the sequence of VH-ICD (see Table 21(b)), the cognate VH DNA sequence is VL-ICD; and the second VH DNA sequence is the sequence of VH-IHG, VH-IHI, VH-ICC, VH-IGG, VH-IFD, VH-IED, VH-IHD or VH-IHF. For example, the first VH DNA sequence is the sequence of VH-IGG (see Table 21(b)), the cognate VH DNA sequence is VL-IGG; and the second VH DNA sequence is the sequence of VH-ICC, VH-ICD, VH-IHI, VH-IFD, VH-IED, VH-IHD or VH-IHF. For example, the first VH DNA sequence is the sequence of VH-IFD (see Table 21(b)), the cognate VH DNA sequence is VL-IFD; and the second VH DNA sequence is the sequence of VH-IHG, VH-IHI, VH-ICC, VH-ICD, VH-GG, VH-IED, VH-IHD or VH-IHF. For example, the first VH DNA sequence is the sequence of VH-IED (see Table 21(b)), the cognate VH DNA sequence is VL-IED; and the second VH DNA sequence is the sequence of VH-IHG, VH-IHI, VH-ICC, VH-ICD, VH-IGG, VH-IFD, VH-IHD or VH-IHF. For example, the first VH DNA sequence is the sequence of VH-IHD (see Table 21(b)), the cognate VH DNA sequence is VL-IHD; and the second VH DNA sequence is the sequence of VH-IHG, VH-IHI, VH-ICC, VH-ICD, VH-GG, VH-IFD, VH-IED, or VH-IHF. For example, the first VH DNA sequence is the sequence of VH-IHF (see Table 21(b)), the cognate VH DNA sequence is VL-IHF; and the second VH DNA sequence is the sequence of VH-IHG, VH-IHI, VH-ICC, VH-ICD, VH-GG, VH-IFD, VH-IED or VH-IHD. Preferably, the second VH DNA sequence is VH-ICC or VH-IHG.

[2111] Optionally, the multimer comprises first and second antigen binding sites which are different from each other. For example, the first binding site comprises a first VH/VL pair and the second binding site comprises a second VH/VL pair. In an example, the VH of the first VH/VL pair is encoded by a DNA sequence that is at least 70, 75, 80, 85, 90, 95, 96, 97, 98 or 99% identical (or 100% identical) to the DNA sequence of VH-ICC and the VL is encoded by a DNA sequence that is at least 70, 75, 80, 85, 90, 95, 96, 97, 98 or 99% identical (or 100% identical) to the DNA sequence of VL-ICC; and the VH of the second VH/VL pair is encoded by a DNA sequence that is at least 70, 75, 80, 85, 90, 95, 96, 97, 98 or 99% identical (or 100% identical) to the DNA sequence of VH-IHG and the VL is encoded by a DNA sequence that is at least 70, 75, 80, 85, 90, 95, 96, 97, 98 or 99% identical (or 100% identical) to the DNA sequence of VL-IHG. For example, the multimer comprises (i) at least 4, 8, 12, 16, 20, 24 or 28 (optionally no more than 4, 8, 12, 16, 20, 24 or 28 respectively) copies of a further antibody variable domain that is different from the domain of (i). For example, each domain is capable of specifically binding to a SARS-CoV-2 antigen.

[2112] In an embodiment, the multimer comprises a tetramer of a polyeptide dimer, wherein the dimer comprises a first polypeptide associated with a second polypeptide, wherein the first polypeptide comprises at least one copy of a first peptide or a first antigen binding site and a teramerisation domain (TD), the second polypeptide comprises at least one copy of a second peptide or a second antigen binding site and a teramerisation domain (TD).

[2113] Preferably, the TDs of the first and second polypeptides are identical. Optionally, the TDs are p53 TDs, such as human p53 TDs. In one embodiment, each of the first and second polypeptides comprises a said peptide and the first and second peptides are different. In one embodiment, each of the first and second polypeptides comprises a said peptide and the first and second peptides are the same. In one embodiment, each of the first and second polypeptides comprises a said binding site and the first and second binding sites are different.

[2114] In one embodiment, each of the first and second polypeptides comprises a said binding site and the first and second binding sites are the same. In an example, in each dimer the first and second polypeptides are disulphide bonded together.

[2115] In an example, in each dimer the first polypeptide comprises an antibody CH3 domain (eg, a CH2-CH3) and the second polypeptide comprises an antibody CH3 domain (eg, a CH2-CH3), wherein the CH3 domains associate together to form said dimer. For example, each of the first and second polypeptides comprises, in N- to C-terminal direction, a peptide or antigen binding site -TD -optional CH2 domain -CH3 domain, wherein the CH3 domains are associated together. For example, each of the first and second polypeptides comprises, in N- to C-terminal direction, a peptide or antigen binding site - optional CH2 domain - CH3 domain - TD, wherein the CH3 domains are associated together.

[2116] “Knobs into holes” technology for making bispecific antibodies was described in [¹] and in US5,731,168, both incorporated herein by reference. The principle is to engineer paired CH3 domains of heterodimeric heavy chains so that one CH3 domain contains a “knob” and the other CH3 domains contains a “hole” at a sterically opposite position. Knobs are created by replacing small amino acid side chain at the interface between the CH3 domains, while holes are created by replacing large side chains with smaller ones. The knob is designed to insert into the hole, to favour heterodimerisation of the different CH3 domains while destabilising homodimer formation. In in a mixture of antibody heavy and light chains that assemble to form a bispecific antibody, the proportion of IgG molecules having paired heterodimeric heavy chains is thus increased, raising yield and recovery of the active molecule

[2117] Mutations Y349C and/or T366W may be included to form “knobs” in an IgG CH3 domain. Mutations E356C, T366S, L368A and/or Y407V may be included to form “holes” in an IgG CH3 domain. Knobs and holes may be introduced into any human IgG CH3 domain, e.g., an IgG1, IgG2, IgG3 or IgG4 CH3 domain. A preferred example is IgG4. The IgG4 may include further modifications such as the “P” and/or “E” mutations. A “P” substitution at position 228 in the hinge (S228P) stabilises the hinge region of the heavy chain. An “E” substitution in the CH2 region at position 235 (L235S) abolishes binding to FcyR. A bispecific antibody of the present invention may contain an IgG4 PE human heavy chain constant region, optionally comprising two such paired constant regions, optionally wherein one has “knobs” mutations and one has “holes” mutations.

[2118] While knobs-into-holes technology involves engineering amino acid side chains to create complementary molecular shapes at the interface of the paired CH3 domains in the bispecific heterodimer, another way to promote heterodimer formation and hinder homodimer formation is to engineer the amino acid side chains to have opposite charges. Association of CH3 domains in the heavy chain heterodimers is favoured by the pairing of oppositely charged residues, while paired positive charges or paired negative charges would make homodimer formation less energetically favourable. WO2006/106905 described a method for producing a heteromultimer composed of more than one type of polypeptide (such a heterodimer of two different antibody heavy chains) comprising a substitution in an amino acid residue forming an interface between said polypeptides such that heteromultimer association will be regulated, the method comprising:
[2119] (a) modifying a nucleic acid encoding an amino acid residue forming the interface between polypeptides from the original nucleic acid, such that the association between polypeptides forming one or more multimers will be inhibited in a heteromultimer that may form two or more types of multimers;
[2120] (b) culturing host cells such that a nucleic acid sequence modified by step (a) is expressed; and
[2121] (c) recovering said heteromultimer from the host cell culture,
wherein the modification of step (a) is modifying the original nucleic acid so that one or more amino acid residues are substituted at the interface such that two or more amino acid residues, including the mutated residue(s), forming the interface will carry the same type of positive or negative charge.

[2122] An example of this is to suppress association between heavy chains by introducing electrostatic repulsion at the interface of the heavy chain homodimers, for example by modifying amino acid residues that contact each other at the interface of the CH3 domains, including:
[2123] (a) positions 356 and 439
[2124] (b) positions 357 and 370
[2125] (c) positions 399 and 409,
the residue numbering being according to the EU numbering system.

[2126] By modifying one or more of these pairs of residues to have like charges (both positive or both negative) in the CH3 domain of a first heavy chain, the pairing of heavy chain homodimers is inhibited by electrostatic repulsion. By engineering the same pair or pairs of residues in the CH3 domain of a second (different) heavy chain to have an opposite charge compared with the corresponding residues in the first heavy chain, the heterodimeric pairing of the first and second heavy chains is promoted by electrostatic attraction.

[2127] In one example, amino acids at the heavy chain constant region CH3 interface of the dimer of the invention are modified to introduce charge pairs, the mutations being listed in Table 1 of WO2006/106905. It was reported that modifying the amino acids at heavy chain positions 356, 357, 370, 399, 409 and 439 to introduce charge-induced molecular repulsion at the CH3 interface had the effect of increasing efficiency of formation of the intended bispecific antibody. WO2006/106905 also exemplified bispecific IgG antibodies in which the CH3 domains of IgG4 were engineered with knobs-into-holes mutations.

[2128] Further examples of charge pairs are disclosed in WO2013/157954, which described a method for producing a heterodimeric CH3 domain-comprising molecule from a single cell, the molecule comprising two CH3 domains capable of forming an interface. The method comprised providing in the cell
[2129] (a) (a) a first nucleic acid molecule encoding a first CH3 domain-comprising polypeptide chain, this chain comprising a K residue at position 366 according to the EU numbering system and
[2130] (b) (b) a second nucleic acid molecule encoding a second CH3 domain-comprising polypeptide chain, this chain comprising a D residue at position 351 according to the EU numbering system,
the method further comprising the step of culturing the host cell, allowing expression of the two nucleic acid molecules and harvesting the heterodimeric CH3 domain-comprising molecule from the culture.

[2131] Further methods of engineering electrostatic interactions in polypeptide chains to promote heterodimer formation over homodimer formation were described in WO2011/143545.

[2132] Another example of engineering at the CH3-CH3 interface that can be used in the dimer of the invention is strand-exchange engineered domain (SEED) CH3 heterodimers. The CH3 domains are composed of alternating segments of human IgA and IgG CH3 sequences, which form pairs of complementary SEED heterodimers referred to as “SEED-bodies” [²; WO2007/110205].

[2133] Bispecifics have also been produced with heterodimerised heavy chains that are differentially modified in the CH3 domain to alter their affinity for binding to a purification reagent such as Protein A. WO2010/151792 described a heterodimeric bispecific antigen-binding protein comprising
[2134] (a) a first polypeptide comprising, from N-terminal to C-terminal, a first epitope-binding region that selectively binds a first epitope, an immunoglobulin constant region that comprises a first CH3 region of a human IgG selected from IgG1, IgG2, and IgG4; and
[2135] (b) a second polypeptide comprising, from N-terminal to C-terminal, a second epitope-binding region that selectively binds a second epitope, an immunoglobulin constant region that comprises a second CH3 region of a human IgG selected from IgG1, IgG2, and IgG4, wherein the second CH3 region comprises a modification that reduces or eliminates binding of the second CH3 domain to Protein A.

[2136] Thus, in the dimer of the present invention, the CH3 of one (but not the other) of the first and second polypeptides comprises a modification that reduces or eliminates binding of the respective CH3 domain to Protein A.

[2137] Dimers and antibodies of the present invention may employ any of these techniques and molecular formats as desired.

[2138] Optionally, each of the first and second polypeptides comprises an antigen binding site, wherein each binding site is an antibody single variable domain (eg, a VHH or nanobody).

[2139] Optionally, the dimer comprises a third polypeptide and a fourth polypeptide, wherein the third polypeptide is associated with the first polypeptide, and the fourth polypeptide is associated with the second polypeptide, wherein each polyeptide comprises an antibody variable domain, wherein (i) the variable domain of the first polypeptide is paired with the variable domain of the third polypepeptide to form a first VH/VL binding site for binding a first antigen; (ii) and the variable domain of the second polypeptide is paired with the variable domain of the fourth polypepeptide to form a second VH/VL binding site for binding a second antigen. Preferably, the first antigen is different from the second antigen. In an alternative, the first and second antigens are the same. In an example, the variable domain of the first polypeptide is a VH and the variable domain of the third polypeptide is a VL. In an example, the variable domain of the first polypeptide is a VL and the variable domain of the third polypeptide is a VH. In an example, the variable domain of the second polypeptide is a VH and the variable domain of the fourth polypeptide is a VL. In an example, the variable domain of the second polypeptide is a VL and the variable domain of the fourthe polypeptide is a VH.

[2140] For example, the first polypeptide comprises a CH1 domain that associates with a CL domain that is comprised by the third polypeptide and/or the second polypeptide comprises a CH1 domain that associates with a CL domain that is comprised by the fourth polypeptide.

[2141] For example, (i) the first polypeptide comprises, in N- to C-terminal direction, a peptide or a variable domain of a first VH/VL antigen binding site - CH1 domain - optional hinge region -TD - [a Fc region comprising a CH2 domain and aCH3 domain]; and (ii) the second polypeptide comprises, in N- to C-terminal direction, a peptide or a variable domain of a second VH/VL antigen binding site - CH1 domain - optional hinge region -TD - [a Fc region comprising a CH2 domain and a CH3 domain], wherein the CH3 domains of the first and second polypeptides are associated together. In this example, (i) the third polypeptide comprises, in N- to C-terminal direction, a peptide or a variable region of the first antigen binding site - CL; (ii) the fourth polypeptide comprises, in N- to C-terminal direction, a peptide or a variable region of the second antigen binding site - CL, wherein (iii) said variable domains or the first and third polypeptides form the first VH/VL binding site (eg, wherein the variable domain of the first polypeptide is a VH and the variable domain of the third polypeptide is a cognate VL), (iv) said variable domains of the second and fourth polypeptides form the second VH/VL binding site (eg, wherein the variable domain of the second polypeptide is a VH and the variable domain of the fourth polyeptide is a cognate VL), (v) the CH1 of the first polypeptide is associated with the CL of the third polypeptide, (vi) the CH1 of the second polypeptide is associated with the CL of the fourth polypeptide, and (vii) the Fc of the first polyeptide is associated with the Fc of the seond polypeptide (eg, the CH3 domains are associated together).

[2142] Optionally, the Fc regions (or CH3 domains) of the first and second polypeptides are associated together using knob-in-hole technology or charge pairing.

[2143] The multimer of the invention may be a multimer for administration to a human or animal subject for treatment or prevention of a disease or condition (eg, an infection by the first and/or second virus, or a symptom of such an infection (eg, an unwanted inflammatory response)) in the subject.

[2144] The invention provides:

[2145] A method for the treatment or prevention of a disease or condition (eg, an infection by the first and/or second virus, or a symptom of such an infection (eg, an unwanted inflammatory response)) in a human or animal subject, the method comprising administering to the subject a plurality of multimers of the invention.

[2146] An assay kit comprising an assay reagent as mentioned above and an amount of the first antigen (eg, viral spike protein), optionally wherein the reagent and protein are comprised by different containers.

[2147] A method for detecting the presence of an antigen in a sample, the method comprising combining the sample with a multimer of the invention, allowing antigen in the sample to bind multimers to form antigen/multimer complexes and detecting antigen/multimer complexes.

[2148] A method of expanding a utility of an antigen (eg, a protein) binding site, the method comprising producing a multimer of the invention, wherein the multimer comprises a plurality of copies (eg, at least 8 or 16 copies) of the binding site.

[2149] Optionally for the multimer, dimer, polypeptide, method, kit or composition, the multimer comprises a tetramer of a polyeptide dimer, wherein the dimer comprises a first polypeptide associated with a second polypeptide, wherein the first polypeptide comprises at least one copy of a first peptide or a first antigen binding site and a teramerisation domain (TD), the second polypeptide comprises at least one copy of a second peptide or a second antigen binding site and a teramerisation domain (TD).

[2150] Optionally, each of the first and second polypeptides comprises a said binding site and the first and second binding sites are different.

[2151] Optionally, in each dimer the first polypeptide comprises an antibody CH3 domain (eg, a CH2-CH3) and the second polypeptide comprises an antibody CH3 domain (eg, a CH2-CH3), wherein the CH3 domains associate together to form said dimer.

[2152] Optionally, each of the first and second polypeptides comprises, in N- to C-terminal direction, (i) a peptide or antigen binding site -TD - optional CH2 domain -CH3 domain, wherein the CH3 domains of the first and second polypeptides are associated together; or (ii) a peptide or antigen binding site - optional CH2 domain - CH3 domain - TD, wherein the CH3 domains of the first and second polypeptide are associated together.

[2153] Optionally, each of the first and second polypeptides comprises an antigen binding site, wherein each binding site is an antibody single variable domain (eg, a VHH or nanobody).

[2154] Optionally, the dimer is associated with a third polypeptide and a fourth polypeptide, wherein the third polypeptide is associated with the first polypeptide, and the fourth polypeptide is associated with the second polypeptide, wherein each polyeptide comprises an antibody variable domain, wherein (i) the variable domain of the first polypeptide is paired with the variable domain of the third polypepeptide to form a first VH/VL binding site for binding a first antigen; and (ii) the variable domain of the second polypeptide is paired with the variable domain of the fourth polypepeptide to form a second VH/VL binding site for binding a second antigen.

[2155] Optionally, the first and second antigens are different.

[2156] Optionally, the variable domain of the first polypeptide is a VH and the variable domain of the third polypeptide is a VL and/or the variable domain of the second polypeptide is a VH and the variable domain of the fourth polypeptide is a VL.

[2157] Optionally, (A) (i) the first polypeptide comprises a CH1 domain that associates with a CL domain that is comprised by the third polypeptide and (ii) the second polypeptide comprises a CH1 domain that associates with a CL domain that is comprised by the fourth polypeptide; or (B) (i) the first polypeptide comprises a CH1 domain that associates with a CL domain that is comprised by the third polypeptide and (ii) the second polypeptide comprises a CL domain that associates with a CH1 domain that is comprised by the fourth polypeptide.

[2158] In an embodiment of option (A), the third and fourth polypeptides are identical. Thus, a common chain or polypeptide is used. Thus, the common polypeptide associates with each of the first and second polypeptides. This may simplify production by requiring only 3, instead of 4 different polypeptides to be expressed together.

[2159] Option (B) is useful to reduce chances of undesirable light chain pairing, ie, the fourth polypeptide pairing with the first polypeptide and/or the third polypeptide pairing with the second polypeptide. Thus, having the CH1 in the first polypeptide and the CL in the third polypeptide, this avoids the risk of the third polypeptide pairing with the second polypeptide, since these two polypeptides comprise CL domains that do not pair with each other. Similarly, the CH domains of the first and fourth polypeptides do not pair with each other. This is advantageous for favouring production of multimers of the invention where there is a first/third polypeptide pair and a second/fourth polypeptide pair comprised by each dimer of the multimer. For example (i) the first/third polypeptide pair comprises the following configuration wherin the first polypeptide comprises in N- to C-terminal direction [VH-CL-Hinge-CH2-CH3-TD] paired with the third polypeptide wherein the third polypeptide comprises in N- to C-terminal direction [VL-CH1]; and (ii) the second/fourth polypeptide pair comprises the following configuration wherein the second polyeptide comprises in N- to C-terminal direction [VH-CH1-Hinge-CH2-CH3-TD] paired with the fourth polypeptide wherein the fourth polypeptide comprises in N- to C-terminal direction [VL-CL].

[2160] Optionally:
[2161] (A)
   [2162] (i) the first polypeptide comprises, in N- to C-terminal direction, a variable domain of a first VH/VL antigen binding site - CH1 domain - optional hinge region - [a Fc region comprising a CH2 domain and a CH3 domain];
   [2163] (ii) the second polypeptide comprises, in N- to C-terminal direction, a variable domain of a second VH/VL antigen binding site - CH1 domain - optional hinge region - [a Fc region comprising a CH2 domain and a CH3 domain];
   [2164] (iii) the third polypeptide comprises, in N- to C-terminal direction, a variable region of the first antigen binding site - CL;
   [2165] (iv) the fourth polypeptide comprises, in N- to C-terminal direction, a variable region of the second antigen binding site - CL;
   [2166] (v) said variable domains or the first and third polypeptides form the first VH/VL binding site (eg, wherein the variable domain of the first polypeptide is a VH and the variable domain of the third polypeptide is a cognate VL);
   [2167] (vi) said variable domains of the second and fourth polypeptides form the second VH/VL binding site (eg, wherein the variable domain of the second polypeptide is a VH and the variable domain of the fourth polyeptide is a cognate VL);
   [2168] (vii) the CH1 of the first polypeptide is associated with the CL of the third polypeptide; (viii) the CH1 of the second polypeptide is associated with the CL of the fourth polypeptide, and (ix) the Fc of the first polyeptide is associated with the Fc of the second polypeptide (eg, the CH3 domains are associated together); or
[2169] (B)
   [2170] (i) the first polypeptide comprises, in N- to C-terminal direction, a first antibody single variable domain - CH1 domain - optional hinge region - [a Fc region comprising a CH2 domain and a CH3 domain];
   [2171] (ii) the second polypeptide comprises, in N- to C-terminal direction, a second antibody single variable domain - CH1 domain - optional hinge region - [a Fc region comprising a CH2 domain and a CH3 domain]; and
   [2172] (ix) the Fc of the first polyeptide is associated with the Fc of the second polypeptide (eg, the CH3 domains are associated together).

[2173] Optionally, the Fc regions of the first and second polypeptides are associated by knob-in-hole or charge pairing technology.

[2174] Optionally:
[2175] (i) each of the first and second polypeptides comprises a respective TD between the CH1 and the Fc thereof;
[2176] (ii) each of the first and second polypeptides comprises a hinge reion and each of said polypeptides comprises a respective TD between the hinge region and the Fc thereof; or
[2177] (iii) each of the first and second polypeptides comprises in N- to C-terminal direction the Fc thereof and a respective TD.

[2178] Optionally, (i) the first/third polypeptide pair comprises a configuration wherein the first polypeptide comprises in N- to C-terminal direction [VH-CL-Hinge-CH2-CH3-TD] paired with the third polypeptide comprising in N- to C-terminal direction [VL-CH1]; and (ii) the second/fourth polypeptide pair comprises a wherein the second polyeptide comprises in N- to C-terminal direction [VH-CH1-Hinge-CH2-CH3-TD] paired with the fourth polypeptide wherein the fourth polypeptide comprises in N- to C-terminal direction [VL-CL].

[2179] Optionally, the Fc regions of the first and second polypeptides are associated using knob-in-hole technology, wherein (i) the Fc of the first polypeptide comprises a CH3 domain having a knob that associates with a hole of a CH3 domain of the Fc of the second polypeptide; or (ii) the Fc of the first polypeptide comprises a CH3 domain having a hole that associates with a knob of a CH3 domain of the Fc of the second polypeptide.

[2180] Optionally, the Fc regions of the first and second polypeptides are associated using charge pairing technology, wherein (i) the Fc of the first polypeptide comprises a first amino acid positive charge that associates with a second amino acid negative charge of the Fc of the second polypeptide; or (ii) the Fc of the first polypeptide comprises a first amino acid negative charge that associates with a second amino acid positive charge of the Fc of the second polypeptide.

[2181] In an alternative, the first, but not the second, polypeptide comprises a TD. In another alternative each of the first and second polypeptides are devoid of a TD.

[2182] In an alternative, the dimer of the invention may be devoid of a TD, wherein the Fc regions of the first and second polypeptides are associated together in the dimer. For such an embodiment where the dimer is devoid of a TD, all other features of the dimer disclosed herein (in respect of dimers comprsing a TD) are otherwise applicable mutatis mutandis and combinable with the alternative emobidment that is devoid of a TD. For example, the Fc regions may be associated using any technology described herein, such as using knob-in-hole or charge pairing technology. In an embodiment, the first polyeptide comprises a first antigen binding site (eg, a single variable domain or a variable domain that is paired with a variable domain of the third polypeptide (when present) to form a first VH/VL binding site) and/or the second polyeptide comprises a second antigen binding site (eg, a single variable domain or a variable domain that is paired with a variable domain of the fourth polypeptide (when present) to form a second VH/VL binding site).

[2183] Optionally, the dimer is an antibody and the first polypeptide is a first heavy chain, the second polypeptide is a second heavy chain, the third polypeptide is a first light chain and the fourth polypeptide is a second light chain. For example, the first and second heavy chains are identical. In an example, they are different (eg, they comprise different peptides or they comprise different antigen binding sites or V domains). For example, the first and second light chains are identical. In an example, they are different (eg, they comprise different different peptides or they comprise different antigen binding sites or V domains). In an embodiment the dimer is a bispecific antibody wherein the first and second heavy chains comprise different binding sites capable of binding a respective antigen and the light chains are identical; alternatively, the light chains are different (eg, V′-CL and V″-CL wherein V′=a first variable domain (eg, a VL, VH or dAb) that is capable (alone or paired with a V domain of the associated heavy chain) of binding a first antigen; and V″= a second variable domain (eg, a VL, VH or dAb) that is capable (alone or paired with a V domain of the associated heavy chain) of binding a second antigen). In an embodiment, a V domain of the first heavy chain is paired with a V domain of the first light chain and is comprised by a first VH/VL binding site that is capable of binding to a first antigen; and/or a V domain of the second heavy chain is paired with a V domain of the second light chain and is comprised by a first VH/VL binding site that is capable of binding to a second antigen. The antigens in this case are different, eg, different antigens of a virus, bacterium or cell.

[2184] Optionally each single variable domain is selected from a variable domain disclosed herein. Optionally, each VH/VL binding site is a VH/VL binding site comprised by an antibody disclosed herein (or encoded by VH and VL DNA sequences disclosed herein). Optionally, the antigen is a viral antigen (eg, a coronavirus or SARS-CoV or SARS-Cov-2 antigen, such as RBD or spike antigen) and each single variable domain is an anti-viral antigen variable domain (eg, nanobody or VH or VHH) disclosed herein, such as a variable domain that comprises the amino acid sequence of QB-GB (SEQ ID NO: 307), QB-DD, QB-BG or QB-FE). Optionally, the first and second antigen binding sites are different. Optionally, they are the same. Optionally, the first and second VH/VL sites are different. Optionally, they are the same. Optionally, the first VH/VL site is (i) a VH/VL binding site comprising a VH and a VL encoded by a VH DNA sequence and the cognate VL DNA sequence shown in Table 21(b), or (ii) a VH/VL binding site of any antibody disclosed in Table 21(a). For example, the VH and VL are encoded by VH-ICC and VL-ICC DNA sequences. Optionally, the second VH/VL site is (i) a VH/VL binding site comprising a VH and a VL encoded by a VH DNA sequence and the cognate VL DNA sequence shown in Table 21(b), or (ii) a VH/VL binding site of any antibody disclosed in Table 21(a). For example, the VH and VL are encoded by VH-IHG and VL-IHG DNA sequences. In one embodiment, the first and second VH/VL sites are the same. In another embodiment, they are different.

[2185] Optionally, a polypeptide herein (eg, a first; second; third; fourth; first and second; third and fourth; or first, second, third and fourth polypeptide) comprises in N-to C-terminal direction (i) a first antibody single variable domain, a second antibody single variable domain and TD; or a first antibody single variable domain, a second antibody single variable domain and Fc; or (iii) a first antibody single variable domain, a second antibody single variable domain and CH1. Each single variable domain is capable of binding to a respective antigen. Preferably, the antigens are different, although they may be the same. Optionally, the single variable domains are connected by a peptide linker (eg, a (G4S)n linker, wherein n=1, 2, 3, 4, 5, 6, 7, 8, 9, or 10, preferably 2 or 3). Optionally, the single variable domains are directly connected together.

[2186] Optionally, when the first and second polypeptides of the dimer are associated with the third and fourth polypeptides respectively, the first and third polypeptides comprise a respective variable domain, wherein the variable domains are comprised by a VH/VL pair that is capable of binding a first antigen; and wherein the second polypeptide comprises a first antibody single variable domain that is capable of binding a second antigen; and the fourth polypeptide comprises a second antibody variable domain that is capable of binding a third antigen. In an example, the first antigen is different from the second and third antigens. In an example, the second and third antigens are the same, or they may be different. Each single variable domain (dAb) may, for example, be a nanobody. Each single variable domain (dAb) may, for example, be a human dAb. In an embodiment, (i) the first polypeptide comprises a configuration of, in N- to C-terminal direction, V1-CH1-Hinge-CH2-CH3(with optional knob or first charged amino acid)-TD which is paired with the third polypeptide, wherein the third polypeptide comprises a configuration of, in N- to C-terminal direction, V2-CL, wherein V1 and V2 comprise a first VH/VL pair that is capable of binding to the first antigen (eg, wherein V1=VH and V2=VL; or V1=VL and V2=VH); and (ii) the second polypeptide comprises a configuration of, in N- to C-terminal direction, V3-CH1-Hinge-CH2-CH3(with optional hole that pairs with the knob; or optionally a second charged amino acid that pairs with the first charged amino acid)-TD, wherein the fourth polypeptide comprises a configuration of, in N- to C-terminal direction, V4-CL, wherein each of V3 and V4 is an antibody single variable domain that is capable of binding to a second and third antigen respectively. In an alternatiave, hinge is absent from the first and second polypeptides. Optionally, the first charge is a positive charge and the second charge is a negative charge. Optionally, the second charge is a positive charge and the first charge is a negative charge.

[2187] Optionally, wherein the dimer comprises the first and second polypeptides and a third (but not fourth) polypeptide, wherein the first polypeptide is associated with the third polypeptide, the first and third polypeptides comprise a respective variable domain, wherein the variable domains are comprised by a VH/VL pair that is capable of binding a first antigen; and wherein the second polypeptide comprises a first antibody single variable domain that is capable of binding a second antigen. In an example, the first antigen is different from the second antigen. Preferably, the second polypeptide is devoid of a CH1 domain. In an example, the first and second antigens are the same, or they may be different. The single variable domain (dAb) may, for example, be a nanobody. The single variable domain (dAb) may, for example, be a human dAb. In an embodiment, (i) the first polypeptide comprises a configuration of, in N- to C-terminal direction, V1-CH1-Hinge-CH2-CH3(with optional knob or first charged amino acid)-TD which is paired with the third polypeptide, wherein the third polypeptide comprises a configuration of, in N- to C-terminal direction, V2-CL, wherein V1 and V2 comprise a first VH/VL pair that is capable of binding to the first antigen (eg, wherein V1=VH and V2=VL; or V1=VL and V2=VH); and (ii) the second polypeptide comprises a configuration of, in N- to C-terminal direction, V3-Hinge-CH2-CH3 (with optional hole that pairs with the knob; or optionally a second charged amino acid that pairs with the first charged amino acid)-TD, wherein V3 is an antibody single variable domain that is capable of binding to the second antigen. In an alternatiave, hinge is absent from the first and second polypeptides. Optionally, the first charge is a positive charge and the second charge is a negative charge. Optionally, the second charge is a positive charge and the first charge is a negative charge. This arrangement, wherein the second polypeptide is devoid of a CH1, avoids the need for a polypeptide (such as a fourth polypeptide) that pairs with the second polypeptide. Thus, the third polypeptide will pair with the first polypeptide and undesirable pairing of the third polypeptide with the second polypeptide is avoided. This is useful for providing favourable yields of the desired dimer (comprising the first, second and third polypeptides with the third polypeptide paired with the first, but not the second polypeptide) and reduce contamination by the undesired configuration (comprising the first, second and third polypeptides with the third polypeptide paired with the first and the second polypeptides).

### Inhalable Compositions

[2188] A inhalable pharmaceutical composition (or dose of said composition) is provided which comprises particles of any multimer disclosed herein in the size range from 0.5 to 5.0 µm. For example, at least 60% (eg, 60-80% or 60-90%) of particles are in said size range. Optionally, at least 20% (eg, 20-40% or 20-35% or 20-30%) of particles are in the size range >4.7 µm (coarse particles), and optionally in the size range >4.7 µm but no more than 5.0 µm. Optionally, at least 50% (eg, at least 60%, 50-80%, 50-75%, 50-70% 50-65%) of particles are in the size range <4.7 µm (fine particles). Optionally, at least 15% (eg, at least 10%, at least 5%, at least 4, 3, 2 or 1%) of particles are in the size range <1.0 µm (ultra-fine particles). Preferably, the particles are nebulised particles. For example, the composition or dose is comprised by a nebuliser. For example, the composition or dose is comprised by an inhaler. For example, the composition or dose is obtainable by nebulising the multimer, eg, using an Aeroneb Solo™ nebuliser. The composition or dose comprises the multimer and a pharmaceutically acceptable carrier; such carriers for inhalable formulations will be familiar to the skilled addressee.

[2189] In a preferred example,
[2190] a) at least 20% (eg, 20-40% or 20-35% or 20-30%) of multimer particles are in the size range >4.7 µm, and optionally in the size range >4.7 µm but no more than 5.0 µm;
[2191] b) at least 50% (eg, at least 60%, 50-80%, 50-75%, 50-70% 50-65%) of multimer particles are in the size range <4.7 µm; and
[2192] c) at least 15% (eg, at least 10%, at least 5%, at least 4, 3, 2 or 1%) of multimer particles are in the size range <1.0 µm (ultra fine particles).

[2193] In a preferred example,
[2194] a) at least 20% of multimer particles are in the size range >4.7 µm, and optionally no more than 5.0 µm; and
[2195] b) at least 50% of multimer particles are in the size range <4.7 µm, and optionally at least 15% of multimer particles are in the size range <1.0 µm.

[2196] In a preferred example,
[2197] a) at least 20% of multimer particles are in the size range >4.7 µm, and optionally no more than 5.0 µm;
[2198] b) at least 50% of multimer particles are in the size range <4.7 µm; and
[2199] c) at least 15% of multimer particles are in the size range <1.0 µm.

[2200] The composition may comprise particles of the multimer and the median mass aerodynamic particle diameter (MMAD) is 2 to 4.5, eg, 2.5 to 4 or 3 to 3.5 µm.

[2201] In an example, the multimer comprises at least 4 copies of an antibody single variable domain, eg, a that specifically binds to a virus antigen, for example a RSV or SARS-CoV-2 antigen, eg, RBD or NTD. For example, the variable domain is CoVnb-112 (also called Nb-112 herein (SEQ ID NO: 288), and the virus antigen is a SARS-CoV-2 antigen), Nb11-59 (Novamab Biopharmaceuticals Co. Ltd, and the virus antigen is a SARS-CoV-2 antigen) or a variable domain of ALX-0171 (Ablynx BV, and the virus antigen is an RSV antigen).

[2202] Preferably, the polypeptide herein comprises the amino acid sequence of any one of SEQ ID NOs: 289 to 292. Preferably, the multimer herein comprises 4 copies of a polypeptide that comprises the amino acid sequence of any one of SEQ ID NOs: 289 to 292, or an amino acid sequence that is at least 80, 85, 90, 95, 96, 97, 98 or 99% identical to the amino acid sequence of any one of SEQ ID NOs: 289 to 292. The pharmaceutical composition herein may comprise such a multimer, eg, for administration to a human or animal subject for treating or preventing a lung condition. The lung condition may be a lung infection, such as a viral infection, or symptom thereof.

### Multimers for Resisting Sars-Cov-2 Mutation

[2203] The polypeptide described herein may, for example, comprise a SARS-CoV-2 antigen binding domain disclosed herein or a binding domain (eg, an antibody single variable domain) that competes with a SARS-CoV-2 antigen binding domain disclosed herein for binding to SARS-CoV-2 spike in an in vitro competition assay. In vitro competition may be determined by standard SPR or ELISA, for example. Any SPR herein is, for example, surface plasmon resonance (SPR) at 37° C. and pH 7.6.

[2204] The polypeptide described herein may, for example, comprise a SARS-CoV-2 antigen binding domain disclosed herein or a binding domain (eg, an antibody single variable domain) that binds to the same SARS-CoV-2 spike epitope (or an overlapping epitope) as a SARS-CoV-2 antigen binding domain disclosed herein.

[2205] The polypeptide described herein may, for example, comprise a binding domain that binds to the inner face of the RBD (receptor-binding domain) of SARS-CoV-2 spike.

[2206] The polypeptide described herein may, for example, comprise a binding domain that binds to the inner face of the RBD (receptor-binding domain) of SARS-CoV-2 spike that is in the up state. Similarly, the multimer herein may comprise copies of such a binding domain. The multimer described herein may, for example, bind to the inner face of the RBD (receptor-binding domain) of SARS-CoV-2 spike. The multimer described herein may, for example, bind to the inner face of the RBD (receptor-binding domain) of SARS-CoV-2 spike that is in the up state.

[2207] The multimer described herein may, for example, comprise copies of a SARS-CoV-2 antigen binding domain, wherein the multimer competes with a SARS-CoV-2 antigen binding domain-containing multimer (eg, Q185B see right-hand-side schematic in FIG. 14B, a tetramer of SEQ ID NO: 236) disclosed herein for binding to SARS-CoV-2 spike in an in vitro competition assay. In vitro competition may be determined by standard SPR or ELISA, for example. Any SPR herein is, for example, surface plasmon resonance (SPR) at 37° C. and pH 7.6.

[2208] The multimer described herein may, for example, comprise copies of a SARS-CoV-2 antigen binding domain, wherein the multimer binds to the same SARS-CoV-2 spike epitope (or an overlapping epitope) as a SARS-CoV-2 antigen binding domain-containing multimer (eg, Q185B see right-hand-side schematic in FIG. 14B, a tetramer of SEQ ID NO: 236) disclosed herein.

[2209] The polypeptide described herein may, for example, comprise binding domain QB-GB or a binding domain (eg, an antibody single variable domain) that competes with QB-GB for binding to SARS-CoV-2 spike in an in vitro competition assay. In vitro competition may be determined by standard SPR or ELISA, for example. Any SPR herein is, for example, surface plasmon resonance (SPR) at 37° C. and pH 7.6.

[2210] The polypeptide described herein may, for example, comprise binding domain QB-GB or a binding domain (eg, an antibody single variable domain) that binds to the same SARS-CoV-2 spike epitope (or an overlapping epitope) as QB-GB.

[2211] The polypeptide described herein may, for example, comprise a binding domain that binds to the inner face of the RBD (receptor-binding domain) of SARS-CoV-2 spike.

[2212] The polypeptide described herein may, for example, comprise a binding domain that binds to the inner face of the RBD (receptor-binding domain) of SARS-CoV-2 spike that is in the up state.

[2213] Similarly, the multimer herein may comprise copies of such a binding domain.

[2214] As explained in Example 37 Quad multimers that have such features have been found to be highly advantageous and may be more resistant to receptor-driven selection pressure associated with SARS-Cov-2 mutation.

[2215] Furthermore, there is provided a method of producing a polypeptide multimer, the method comprising multimerising first, second, third and fourth copies of a polypeptide (eg, any polypeptide disclosed herein) that comprises at least one copy of an SARS-CoV-2 antigen binding domain (eg, QB-GB or a binding domain (eg, an antibody single variable domain) that competes with QB-GB for binding to SARS-CoV-2 spike in an in vitro competition assay, and optionally formulating the multimer in a pharmaceutical composition for administration (eg, injected or pulmonary administration) to a human or animal subject to treat or prevent a coronavirus (preferably, SARS-CoV-2) infection.

[2216] Furthermore, there is provided a method of producing a polypeptide multimer, the method comprising multimerising first, second, third and fourth copies of a polypeptide (eg, any polypeptide disclosed herein) that comprises at least one copy of an SARS-CoV-2 antigen binding domain (such as an antibody variable domain) that binds to the same SARS-CoV-2 spike epitope (or an overlapping epitope) as QB-GB, and optionally formulating the multimer in a pharmaceutical composition for administration (eg, injected or pulmonary administration) to a human or animal subject to treat or prevent a coronavirus (preferably, SARS-CoV-2) infection.

[2217] Furthermore, there is provided a method of producing a polypeptide multimer, the method comprising multimerising first, second, third and fourth copies of a polypeptide (eg, any polypeptide disclosed herein) that comprises at least one copy of an SARS-CoV-2 antigen binding domain (such as an antibody variable domain) that binds to the inner face of the RBD (receptor-binding domain) of SARS-CoV-2 spike, and optionally formulating the multimer in a pharmaceutical composition for administration (eg, injected or pulmonary administration) to a human or animal subject to treat or prevent a coronavirus (preferably, SARS-CoV-2) infection.

[2218] Furthermore, there is provided a method of producing a polypeptide multimer, the method comprising multimerising first, second, third and fourth copies of a polypeptide (eg, any polypeptide disclosed herein) that comprises at least one copy of an SARS-CoV-2 antigen binding domain (such as an antibody variable domain) that binds to the inner face of the RBD (receptor-binding domain) of SARS-CoV-2 spike that is in the up state, and optionally formulating the multimer in a pharmaceutical composition for administration (eg, injected or pulmonary administration) to a human or animal subject to treat or prevent a coronavirus (preferably, SARS-CoV-2) infection.

[2219] The binding domain may be an immunoglobulin domain (eg, an antibody variable domain or single variable domain (dAb or nanboby), or any other type of binding site or domain disclosed herein.

[2220] Any example, configuration, Aspect, Concept, Clause or Paragraph or disclosure herein is combinable with any feature of any further example, configuration, Aspect, Concept, Clause or Paragraph or disclosure herein.

[2221] It will be understood that particular embodiments described herein are shown by way of illustration and not as limitations of the invention. The principal features of this invention can be employed in various embodiments without departing from the scope of the invention. Those skilled in the art will recognise, or be able to ascertain using no more than routine study, numerous equivalents to the specific procedures described herein. Such equivalents are considered to be within the scope of this invention and are covered by the claims. All publications and patent applications mentioned in the specification are indicative of the level of skill of those skilled in the art to which this invention pertains. All publications and patent applications (including US equivalents of all mentioned patent applications and patents) are herein incorporated by reference to the same extent as if each individual publication or patent application was specifically and individually indicated to be incorporated by reference. The use of the word “a” or “an” when used in conjunction with the term “comprising” in the claims and/or the specification may mean “one,” but it is also consistent with the meaning of “one or more,” “at least one,” and “one or more than one.” The use of the term “or” in the claims is used to mean “and/or” unless explicitly indicated to refer to alternatives only or the alternatives are mutually exclusive, although the disclosure supports a definition that refers to only alternatives and “and/or.” Throughout this application, the term “about” is used to indicate that a value includes the inherent variation of error for the device, the method being employed to determine the value, or the variation that exists among the study subjects.

[2222] As used in this specification and claim(s), the words “comprising” (and any form of comprising, such as “comprise” and “comprises”), “having” (and any form of having, such as “have” and “has”), “including” (and any form of including, such as “includes” and “include”) or “containing” (and any form of containing, such as “contains” and “contain”) are inclusive or open-ended and do not exclude additional, unrecited elements or method steps

[2223] The term “or combinations thereof” as used herein refers to all permutations and combinations of the listed items preceding the term. For example, “A, B, C, or combinations thereof is intended to include at least one of: A, B, C, AB, AC, BC, or ABC, and if order is important in a particular context, also BA, CA, CB, CBA, BCA, ACB, BAC, or CAB. Continuing with this example, expressly included are combinations that contain repeats of one or more item or term, such as BB, AAA, MB, BBC, AAABCCCC, CBBAAA, CABABB, and so forth. The skilled artisan will understand that typically there is no limit on the number of items or terms in any combination, unless otherwise apparent from the context.

[2224] Any part of this disclosure may be read in combination with any other part of the disclosure, unless otherwise apparent from the context.

[2225] All of the compositions and/or methods disclosed and claimed herein can be made and executed without undue experimentation in light of the present disclosure. While the compositions and methods of this invention have been described in terms of preferred embodiments, it will be apparent to those of skill in the art that variations may be applied to the compositions and/or methods and in the steps or in the sequence of steps of the method described herein without departing from the concept, spirit and scope of the invention. All such similar substitutes and modifications apparent to those skilled in the art are deemed to be within the spirit, scope and concept of the invention as defined by the appended claims.

### EXAMPLES

### Example 1: Generation of Tetravalent and Octavalent Soluble Heterodimeric NY-ESO-1 TCR Molecules

[2226] This example demonstrates a method for generating tetravalent and octavalent soluble heterodimeric TCR molecules referred to as ts-NY-ESO-1 TCR and os-NY-ESO-1 TCR respectively. These formats overcome the problems associated with solubility and avidity for cognate ligand at the target site.

[2227] To exemplify ts-NY-ESO-1 TCR and os-NY-ESO-1 TCR as stable and soluble molecules, TCR αβ variable sequences with high affinity for NY-ESO-1 together with immunoglobulin constant domains and the NHR2 tetramerisation domain are used in this example.

[2228] The high-affinity NY-ESO TCR αβ chains (composing of TCR Vα-Cα and Vβ-Cβ respectively) specific for SLLMWITQC-HLA-A^{∗}0201 used in this example is as reported in WO 2005/113595 A2 with the inclusion of a signal peptide sequence (MGWSCIILFLVATATGVHS). To aid protein purification, a histidine tag was incorporated to the C-terminus of NHR2 domain.

[2229] DNA constructs encoding components of ts-NY-ESO-1 TCR and os-NY-ESO-1 TCR are synthetically constructed as a two-vector system to allow for their soluble expression and functional assembly in mammalian cells. A schematic representation of the two assembled TCR chains (α and β chains) whose DNA sequences are synthesized for cloning into the expression vector are shown in FIGS. 3 and 4 and their amino acid sequences are shown in FIGS. 5 and 6.

[2230] The pTT5 vector system allows for high-level transient production of recombinant proteins in suspension-adapted HEK293 EBNA cells (Zhang et al., 2009). It contains origin of replication (oriP) that is recognized by the viral protein Epstein-Barr Nuclear Antigen 1 (EBNA-1), which together with the host cell replication factor mediates episomal replication of the DNA plasmid allowing enhanced expression of recombinant protein. Therefore the pTT5 expression vector is selected for cloning the components for the ts-NY-ESO-1 TCR and os-NY-ESO-1 TCR molecules.

[2231] Synthesized DNA fragments containing the TCR αβ chains are digested with restriction enzymes at the restriction sites (RS) (FastDigest, Fermantas) and the DNA separated out on a 1% agarose gel. The correct size DNA fragments is excised and the DNA purified using Qiagen gel extraction kit. The pTT5 vector was also digested with the same restriction enzymes and the linearized plasmid DNA is purified from excised agarose gel. The digested TCR αβ chains is cloned into the digested pTT5 vector to give four expression vectors (pTT5-ts-NY-ESO-1-TCRα, pTT5-ts-ESO-1-TCRβ, pTT5-os-NY-ESO-1-TCRα and pTT5-os-ESO-1-TCRβ).

### Expression of Tetravalent and Octavalent Soluble NY-ESO TCR

[2232] Functional expression of ts-NY-ESO-1 TCR and os-NY-ESO-1 TCR is carried out in suspension-adapted HEK293 EBNA cells. HEK293-EBNA cells are cultured in serum-free Dulbecco’s Modified Eagle Medium (DMEM, high glucose (4.5 g/L) with 2 mM L-glutamine) at 37° C., 5% CO₂ and 95% humidity.

[2233] For each transfection, HEK293-EBNA cells (3 × 10⁷ cells) are freshly seeded into 250 mL Erlenmeyer shaker Flask (Corning) from ~60% confluent cells. Transfections are carried out using FreeStyle MAX cationic lipid base reagent (Life Technologies) according to the supplier’s guidelines. For expression of ts-NY-ESO-1 TCR, 37.5 µg of total plasmid DNA (18.75 µg plasmid DNA each of pTT5-ts-NY-ESO-1-TCRα and pTT5-ts-ESO-1-TCRβ vectors are used or varying amounts of the two expression plasmids) are used per transfection. Similarly for expression of os-NY-ESO-1 TCR, 18.75 µg plasmid DNA each of pTT5-os-NY-ESO-1-TCRα and pTT5-os-ESO-1-TCRβ isare used for transfection. Following transfection, cells were recovered in fresh medium and cultivated at 37° C. with 5% CO₂ in an orbital shaker at 110 rpm for between 4-8 days. Smaller scale transfections are done similarly in 6 well or 24 well plates.

### Analysis of Expressed Soluble eTCR²-BiTE

[2234] The ts-NY-ESO-1 TCR and os-NY-ESO-1 TCR protein molecules secreted into the supernatant are analyzed either directly by sodium dodecyl sulfate (SDS) polyacrylamide gel electrophoresis (PAGE) or after protein purification. Protein samples and standards are prepared under both reducing and non-reducing conditions. SDS-PAGE was performed using cast mini gels for protein electrophoresis in a Mini-PROTEAN Tetra cell electrophoresis system (Bio-Rad). Coomassie blue dye was used to stain proteins in SDS-PAGE gel.

### Purification of ts-NY-ESO-1 TCR and os-NY-ESO-1 TCR Protein Molecules

[2235] Soluble ts-NY-ESO-1 TCR and os-NY-ESO-1 TCR from cell supernatant are purified in two steps. In the first step immobilized metal affinity chromatography (IMAC) are used with nitrilotriacetic acid (NTA) agarose resin loaded with nickel (HisPur Ni-NTA Superflow agarose -Thermo fisher). The binding and washing buffer consists of Tris-buffer saline (TBS) at pH7.2 containing low concentration of imidazole (10-25 mM). Elution and recovery of the His-tagged ts-NY-ESO-1 TCR and os-NY-ESO-1 TCR from the IMAC column are achieved by washing with high concentration of imidazole (>200 mM). The eluted protein fractions are analysed by SDS-PAGE and the fractions containing the protein of interest are pooled. The pooled protein fraction is used directly in binding assays or further purified in a second step involving size-exclusion chromatography (SEC). Superdex 200 increase prepacked column (Gelifesciences) are used to separate out monomer, oligomer and any aggregated forms of the target protein.

### Surface Plasmon Resonance

[2236] The specific binding and affinity analysis of ts-NY-ESO-1 TCR and os-NY-ESO-1 TCR to its pMHC is performed using BIAcore. Briefly, the purified Histidine-tagged ts-NY-ESO-1 TCR and os-NY-ESO-1 TCR proteins are captured onto sensor surface via Ni²⁺ chelation of nitrilotriacetic acid (NTA). Varying concentration of the analyte solution containing NY-ESO pep_{(SLLMWITQV)}-MHC (ProImmune)is injected and the binding signals were monitored

### Example 2: Generation of Tetravalent and Octavalent Soluble NY-ESO TCR-IL2 Fusion Molecule

[2237] The DNA encoding the domains required for expressing ts-NY-ESO-1 TCR-IL2 and os-NY-ESO-1 TCR-IL2 protein complexes are synthesized and cloned into the expression vector pTT5 as described above. A schematic representation of the domains within the TCR αβ chains for ts-NY-ESO-1 TCR-IL2 and os-NY-ESO-1 TCR-IL2 are shown in FIGS. 7 and 8 and the amino acids sequences are shown in FIGS. 9 and 10. Expression, purification and characterization of ts-NY-ESO-1 TCR-IL2 and os-NY-ESO-1 TCR-IL2 are carried out as described above.

### Example 3: High Yield Tetramer Secretion

[2238] Briefly, using conventional genetic engineering techniques, a HEK293-T cell line was made that encodes Quad 16 (FIGS. 14 and 15) and another HEK293-T cell line was made that encodes Quad 17 (FIGS. 14 and 15).

[2239] Protein expression took place and protein was secreted from the cell lines. Samples of the medium in which the cells were incubated were subjected to PAGE under denaturing conditions (SDS-PAGE) or under native conditions (no SDS). The former was further under reduced conditions (using mercaptoethanol), whereas the latter was not.

[2240] The reduced gel showed a distinct banding (FIG. 16) at the expected monomer size. Surprisingly, the unreduced, native gel showed no detectable banding at the monomer, dimer or trimer size, but instead heavy banding was seen at the tetramer size indicating that a very high yield of tetramer had been obtained, and this was confirmed by SEC to be of high purity.

[2241] For Quad 16, the tetramer peak from SEC was run on SDS-PAGE and the obtained band was cut out for mass spectrometry. The data were obtained with trypsin digests and p53 was detected in 100% of the protein. This was conclusive evidence that the secreted Quad 16 was multimerised

### Example 4: Intracellular Protein Expression of Extracellular Portion of TCR Fused to NHR2 TD

### Expression Vector

[2242] All DNA fragments were synthesized and cloned into the expression vector, pEF/myc/cyto (Invitrogen) by Twist Bioscience (California). Schematics and sequences of the synthesized DNA fragments and Quad polypeptides are shown in FIG. 21, and the sequence tables herein.

### DNA Preparation

[2243] Lyophilised plasmid DNA synthesized by Twist Bioscience, were resuspended with MQ water to a concentration of 50 ng/µl. 50 ng of DNA was transformed into 50 µl of competent DH5α cells using a conventional heat shock method. The cells were plated on LB agar plates containing 100 µg/mL ampicillin and grown overnight at 37° C. Individual colonies were picked and grown overnight at 37° C., 220 rpm. The DNA was purified from the cells using the QIAprep Spin Miniprep Kit, according to the manufacturers instructions (Qiagen).

### Transfections in HEK293T Cell

[2244] Briefly, HEK293T cells were maintained in high glucose DMEM supplemented with 10% FBS and Pen/Strep. Cells were seeded at 6 × 10⁵ cells per well of a 6-well plate in 2 ml media and were allowed to adhere overnight at 37° C., 5% CO₂. 7.5 µl of Lipofectamine 2000 was diluted in 150 µl of OptiMem and incubated at room temperature for 5 mins. Plasmid DNA (2.5 µg) was diluted in 150 µl of OptiMem. Diluted DNA was combined with the diluted Lipofectamine 2000, mixed gently and incubated at R.T. for 20 mins. The 300 µl of complexes were added to one well of the 6-well plates. When analysis required the media to be serum free, the media was aspirated and replaced with CD293 media 6 hours post-transfection. The cells were incubated for 48 hours at 37° C., 5% CO₂ prior to analysis.

[2245] Accordingly, different formats of TCR-linked NHR2 tetramerisation domain (TD) constructs (Quads) were transfected into HEK293T cells. Quads 3 & 4 resembling a TCR tetravalent format (structure schematically represented in FIGS. 1 & 3) and Quads 12 & 13 resembling a TCR octavalent format (Structure schematically represented in FIGS. 2 & 4) were transfected for protein expression analysis. Protein samples were prepared from transfected HEK293T cells as follows to check for intracellularly expressed protein. Briefly cells were washed once with 2 ml PBS, which was subsequently aspirated. 150 µl of Trypsin-EDTA (0.05%) was added to each well and the cells were incubated at R.T. for ~1 min. The plate was tapped to lift any strongly adhering cells. 850 µl of media was added to each well to inactivate the trypsin. The cells were transferred to a 1.5 ml eppendorf and spun at 1,000 rpm for 5 mins. The supernatant was aspirated and the pellets stored on ice. The cells were resuspended in 400 µl cell lysis buffer (10 mM Tris pH 7.5, 1% SDS) containing Protease Inhibitor Cocktail Set III (Calbiochem), diluted 1/200. The samples were vortexed vigorously and incubated on ice for 20 mins. The cells were sonicated using a Branson Ultrasonics Sonifier™ (Thermo Fisher Scientific). The amplitude was set to 30% and the cells were sonicated for a total of 24 seconds (6 secs on, 3 secs off ×4). The total protein concentration was quantified using the Pierce

[2246] BCA Protein Assay Kit™, according to the manufacturer’s instructions. 100 µg was diluted with MQ water to give a volume of 80 µl. 20 µl of 5× SDS loading buffer was then added giving samples of 1 mg/ml. Samples were incubated at 95° C. for 5 min prior to SDS-PAGE and Western blot analysis.

[2247] Protein samples were separated on SDS-PAGE under denaturing condition. Typically, 25 µg of whole cell lysate (25 µl) were loaded on to the gel for Western blot analysis. 5 µl of PageRule Prestained 10-180 kDa Protein Ladder was loaded into the gel alongside the protein samples. The gels were run in Tris-Glycine buffer containing 0.1% SDS. A constant voltage of 150 volts was used and the gels were run for ~70 mins until the dye front has migrated fµlly.

[2248] SDS-PAGE (15% Bis-Tris) gels were prepared using the following resolving and stacking gels.

[2249] Resolving Gel:
[2250] 5 ml 30% Bis-Acrylamide
[2251] 2.6 ml 1.5 M Tris (pH 8.8)
[2252] 50 µl 20% SDS
[2253] 100 µl 10% APS
[2254] 10 µl TEMED
[2255] 2.2 ml MQ Water

[2256] Stacking Gel:
[2257] 0.75 ml 30% Bis-Acrylamide
[2258] 1.25 ml 1.5 M Tris (pH 8.8)
[2259] 25 µl 20% SDS
[2260] 50 µl 10% APS
[2261] 5 µl TEMED
[2262] 2.9 ml MQ Water

[2263] Western blotting was performed for the specific and sensitive detection of protein expression of TCR-NHR2 TD fusion proteins from Quads 3, 4, 12 and 13. Proteins separated out on SDS-PAGE were transferred onto Amersham Hybond™ 0.45 µM PVDF membrane as follows. Briefly, Amersham Hybond 0.45 µM PVDF membrane was activated with MeOH for ~1 min and rinsed with transfer buffer (25 mM Tris, 190 mM Glycine, 20% MeOH) before use. The sponge, filter paper, gel, membrane, filter paper, sponge stack was prepared and placed in the cassette for transfer. Transfer was carried out on ice at 280 mA for 75 mins. The membrane was incubated for ~2 hours in blocking buffer (TBST, 5% milk powder). The membrane was washed briefly with TBST before being incubated at 4° C. overnight with anti-human IgG HRP (Thermo, 31410) diluted 1/2500 in TBST, 1% milk powder. The membrane was washed thoroughly (three washes of TBST, 15 mins each) before being developed using the Pierce ECL Western Blotting Substrate.

[2264] Using anti-human IgG detection antibody to probe Western blots, specific protein band at the expected molecular weight can be detected from samples prepared from Quads 3 (46.1 kDa), 4 (46.4 kDa), 12 (47.8 kDa) and 13 (48.1 kDa) (FIGS. 17A and 17B). These data confirm intracellular protein expression of TCR-NHR2 TD fusion proteins in HEK293T cells.

[2265] For all of the Quads analysed, a clear single band can be detected indicating TRVβ-TRCβ-IgG1-CH1 (+/- IgG hinge domain) fusions with the NHR2 TD are stable. These expression data also confirm the possibility of assembling tetravalent (Quads 3 & 4) and octavalent (Quads 12 & 13) molecules as exemplified in this example.

[2266] The difference between Quads 3 and 4 is the presence of a small peptide linker (G4S) located between the IgG1 CH1 domain and NHR2 TD. This is also true for Quads 12 and 13 where Q13 contains a peptide linker between the IgG1 CH1 domain and NHR2 TD. From the expression data, it can be seen the peptide linker does not effect protein expression. However, it may be desirable to include a peptide linker to aid antigen binding and or stabilizing the multimerisation complex in these TCR-NHR2 TD formats.

### Example 5: Soluble Protein Expression of Extracellular Portion of TCR Fused to NHR2 TD

[2267] TCR-NHR2 TD fusion proteins were shown in Example 4 to be expressed intracellularly in HEK293T cells. Here again Quads 3, 4, 12 and 13 were used to demonstrate soluble expression of these fusion proteins. As described above, Quads 3, 4, 12 and 13 were transfected into HEK293T cells and soluble proteins from the cell supernatant were concentrated. Briefly, the media was harvested 48 hours post-transfection and centrifuged at 2,000 rpm for 5 mins to remove any cells or debris. Typically, 500 µl of media was concentrated to 100 µl using Amicon™ Ultra 0.5 Centrifugal Units with a MWCO of 10 kDa. 25 µl of 5× SDS loading buffer was added to the sample, which was then incubated at 95° C. for 5 mins prior to gel/Western blot analysis. Concentrated protein samples were separated out on SDS-PAGE gel and transferred onto Amersham Hybond 0.45 µM PVDF membrane. Western blotting and protein detection was done using anti-human IgG HRP using the methods described above.

[2268] Protein samples concentrated and prepared from cell supernatants show specific protein band at the expected molecular weight on Western blots corresponding to Quads 3 (46.1 kDa), 4 (46.4 kDa), 12 (47.8 kDa) and 13 (48.1 kDa) (FIGS. 18A and 18B). The Western blot expression data unequivocally shows soluble expression of TCR-NHR2 TD fusion proteins in HEK293T. These data are the first report demonstrating soluble expression of TCR-NHR2 TD fusion proteins expressed in eukaryotic cells such as HEK293T cells.

[2269] Detection of soluble protein expression from both tetrameric (Quads 3 & 4) and octameric (Quads 12 & 13) TCR-NHR2 TD formats highlights the potential applicability of NHR2 TD in a broad setting. Use of NHR2 TD fusion molecules could be used for the preparation of therapeutic molecules and protein molecules for use in diagnostics and imaging.

### Example 6: Intracellular Protein Expression of Antibody Fragments Fused to NHR2 TD

[2270] To further exemplify the versatility of NHR2 TD, several different antibody fragment formats fused to NHR2 TD were constructed for testing their expression in HEK293T cells.

[2271] Quads 14 and 15 contain an antibody VH domain fused to NHR2 TD either with or without a peptide linker located between the VH and NHR2 TD as schematically depicted in FIGS. 11 and 21. The VH domain in Quads 14 and 15 are specific for GFP (green fluorescent protein). Several other versions of this format were also constructed and tested with VH specific for therapeutically useful drug targets. Sequences of the binding domains are listed in Table 4. Some of these include Quad 34 (specific for TNFα), Quad 38 (specific for VEGF), Quad 40 (specific for EGFR) and Quad 44 (specific for CD38).

[2272] Quads 38 and 44 were further developed to include an additional binding arm with the inclusion of a second VH domain specific for EGFR and CD138 respectively yielding Quads 42 and 46. Quads 42 and 46 represent bispecific molecules with the capability to multimerise via the NHR2 TD domain to form bispecific tetramers.

[2273] In another example, an effector molecule (human IL2) was linked to the C-terminus of Quads 14 & 15 resulting in Quads 18 and 19, whereby the VH-NHR2-IL2 molecule is tetravalent and bifunctional.

[2274] In another example, antibody Fab fragment (VH-CH1) was linked to NHR2 TD (Quads 23 and 24) and as schematically depicted in FIG. 12. Quads 23 and 24 represent tetravalent Fab molecules when co-expressed or mixed and assembled in-vitro with a second chain containing immunoglobulin light chain (e.g. Quad 25).

[2275] In yet another example, a human IgG1 hinge domain was included to Quads 23 and 24, which is referred to as Quads 26 and 27 and as schematically depicted in FIG. 13. Quads 26 and 27 represent octavalent Fab molecules when co-expressed or mixed and assembled in-vitro with a second chain containing immunoglobulin light chain domains (e.g. Quad 25).

[2276] The following Quad vectors, Quads 14, 15, 18, 19, 23, 24, 26, 27, 34, 38, 40, 42, 44 and 46 all of which are His-tagged were transfected in HEK293T cells. Protein samples were prepared from whole-cell extracts as described above, separated out on SDS-PAGE and transferred onto Amersham Hybond 0.45 µM PVDF membrane. Specific protein expression were probed using anti-His HRP (Sigma, A7058) diluted 1/2500 in TBST, 1% milk powder.

[2277] Specific protein expression in whole cell extracts could be detected for all the different antibody-NHR2 TD fusion proteins tested using Quads 14, 15, 18, 19, 23, 24, 26, 27, 34, 38, 40, 42, 44 and 46 (FIGS. 19A-D). Interestingly, Quads 18 and 19 containing an effector domain (IL2) fused to the C-terminus of NHR2 TD domain, in addition to the VH binding domain fused to the N-terminus of NHR2 TD showed good protein expression.

[2278] Expression of Quads 23 and 24 polypeptides highlights the potential to use NHR2 TD to form tetravalent antibody Fab molecules when co-expressed or mixed in-vitro with a partner soluble Quad molecule (e.g. Quad 25). Similarly expression of Quads 26 and 27, which include human IgG1 hinge domain highlight the potential to use NHR2 TD to form octavalent antibody Fab molecules when co-expressed or mixed in-vitro with a partner soluble second partner chain (e.g. Quad 25).

[2279] Quads 42 and 46 bispecific molecules containing an additional VH domain fused to the C-terminus of NHR2 TD domain also showed good protein expression. These data highlights the versatility of the NHR2 TD domain and its ability to be fused to different binding and effector molecules for developing a vast array of protein formats. The data also suggest it is possible to fuse protein molecules to both the N-terminus and C-terminus of NHR2 TD, which allows for the development of bispecific multivalent protein molecules.

### Example 7: Multivalent Assembly of Antibody Fragments Fused to NHR2 TD

[2280] NHR2 TD is responsible for the oligomerisation of ETO into a tetrameric complex. Using the NHR2 TD domain, it is possible to fuse binding domains and effector molecules to the N-terminus or C-terminus or both N- and C-terminus without effecting expression as shown in examples 4-6. Binding domains could be TCR variable and constant domains, antibody and antibody fragments or effector molecules such as IL2. It is also possible to express proteins in a soluble format when fused to NHR2 TD (FIG. 18) despite NHR2 TD being a part of an intracellularly expressed protein where in nature it is only expressed inside the cell.

[2281] To demonstrate whether NHR2 TD retains its potential to oligomerise once it is fused to a binding domain, Quads 14 and 15 were expressed in HEK293T cells and protein samples were prepared from whole cell extracts as described above. Protein samples were separated out on PAGE gel under denaturing and non-denaturing (native) conditions. Native gels were prepared using the protocol described above, but without SDS. Proteins from PAGE gels were transferred onto Amersham Hybond 0.45 µM PVDF membrane. Specific protein expression was probed with anti-human IgG HRP detection antibody.

[2282] As expected under denaturing conditions, expression of VH-NHR2 TD from Quads 14 and 15 can be seen as a monomer where a specific protein band can be detected at the expected molecular weight (22 and 22.3 kDa) (FIG. 20A). Under non-denaturing and thus native conditions, interestingly no monomer or dimer of VH-NHR2 TD from Quads 14 and 15 can be detected (FIG. 20B). Only a high molecular weight protein band believed to be tetramers of VH-NHR2 TD from Quads 14 and 15 can be detected. The assembly of tetramers appears to be highly efficient and pure judging by the protein intensity and the absence of any detectable monomers and dimers of Quads 14 and 15.

[2283] Together with the data in examples 4-7, there is conclusive evidence NHR2 TD is highly versatile allowing fusion of various protein binding domains and effector molecules. NHR2 TD allows soluble expression of proteins from eukaryotic cells such as HEK293T cells and they form highly stable and pure tetrameric molecules.

### FURTHER EXAMPLES

### Methods

### Expression Vectors

[2284] All DNA fragments were synthesized by Twist Bioscience (California) and cloned into the expression vector, pEF/myc/cyto (Invitrogen). Schematics and sequences of the synthesized DNA fragments are shown in FIG. 22 and Tables 8 -10, respectively.

### Plasmid DNA Preparation

[2285] Lyophilised plasmid DNA synthesized by Twist Bioscience, were resuspended with MQ water to a concentration of 50 ng/µl. Competent E. coli DH5α cells were transformed with 50 ng of DNA using a conventional heat shock method. Transformed cells were plated on LB agar plates containing 100 µg/mL ampicillin and grown overnight at 37° C. Individual colonies were picked and grown in LB broth overnight at 37° C., 220 rpm. Plasmid DNA were purified from the cells using Qiagen plasmid extraction kits, according to the manufacturer’s instructions (Qiagen).

### Expression of Quad Proteins in Expi293F Cells

[2286] Expi293F™ cells (Thermo Fisher Scientific) were cultured in Expi293™ Expression Medium (Thermo Fisher Scientific) according to the manufacturer’s recommendations. The only exception was that 5% CO₂ was added directly to the flasks when the cells were split and non-vented caps were used.

[2287] Two methods involving different transfection reagents were utilised for protein expression. The methods for 30 ml cultures are described below and the protocol was adapted to either scaled up or down according to the experimental requirements.

[2288] For PEI transfections the cells were counted one day prior to transfection using a NC-3000™ (ChemoMetec) and were diluted to 1.5 × 10⁶ cells/ml using Expi293™ Expression Medium. The cells were cultured in 5% CO₂ at 37° C., 125 rpm overnight. The following day the cells were counted, spun down for 5 minutes at 1000 rpm and resuspended at 2 × 10⁶ cells/ml in 30 ml of fresh media. 33 ug of plasmid DNA was added to 900 ul media and 90 ul of PEI Max (Polysciences Inc.) was added to 900 ul media. The DNA and transfection reagent samples were mixed and incubated at room temperature for 15 minutes. The DNA/transfection reagent mixture was added to the cells, which were cultured as before and incubated for a further 72 hrs.

[2289] For transfections with Expifectamine™ 293 Reagent (Thermo Fisher Scientific) the cells were also diluted to 1.5 × 10⁶ cells/ml in Expi293™ Expression Medium one day prior to transfection. On the day of transfection the cells were centrifuged and resuspended at 2.5 × 10⁶ cells/ml in 30 ml of fresh media. Two tubes containing 1.5 ml of Gibco™ Opti-MEM™ (Thermo Fisher Scientific) were prepared. 30 ug of plasmid DNA was added to one tube and 80 ul of Expifectamine was added to the other. The solutions were mixed and incubated at room temperature for 30 minutes. The DNA-transfection reagent complex was added to the cells, which were cultured in 5% CO₂ at 37° C., 125 rpm. Following 16-18 hrs incubation, transfection enhancers 1 and 2 were added to the cells according to the manufacturers protocol. The cells were incubated for a further 96 hours.

### Purification of His-Tagged Proteins

[2290] The cells were harvested by centrifugation for 10 minutes at 4000 rpm. The ~30 ml supernatant was filtered through a 0.22 µm filter and diluted to 50 ml with binding buffer (50 mM HEPES, pH 7,4, 250 mM NaCl, 20 mM imidazole) containing Complete™ EDTA-free protease inhibitors (Roche) to facilitate binding to the column. A 1 ml HisTrap™ HP column (GE Healthcare) was connected to an AKTA Start (GE Healthcare) and pre-equilibrated with binding buffer. The protein-containing media was loaded onto the column using a flow rate of 1 ml/min. The column was washed with >10 CV of binding buffer before the protein was eluted using a 20-300 mM imidazole gradient over 12 ml. 0.5 ml fractions were collected and analysed by SDS-PAGE. Protein containing fractions were pooled and concentrated using Amicon® Ultra centrifugal filter units (Millipore).

[2291] Following affinity chromatography the proteins were either snap frozen and stored at -80° C., dialysed into an alternative buffer for a specific application of gel filtrated to assess the molecular weight of the various Quad formats. For the latter analyses, protein samples were concentrated to 1.5-2 ml and gel filtrated on a Superdex 75 16/600 column (GE Healthcare) using 10 mM HEPES, pH 7.4, 250 mM NaCl.

### Sds-Page

[2292] Purified proteins were analysed by separating out on SDS-PAGE under denaturing condition. Typically, 1-2 µg of purified protein were loaded per lane on SDS-PAGE gel. The gels were run in Tris-Glycine buffer containing 0.1% SDS. A constant voltage of 150 volts was used and the gels were run for ~70 mins until the dye front has migrated fully.

[2293] SDS-PAGE (15% Bis-Tris) gels were prepared using the following resolving and stacking gels.

[2294] Resolving Gel:
[2295] 5 ml 30% Bis-Acrylamide
[2296] 2.6 ml 1.5 M Tris (pH 8.8)
[2297] 50 µl 20% SDS
[2298] 100 µl 10% APS
[2299] 10 µl TEMED
[2300] 2.2 ml MQ Water

[2301] Stacking Gel:
[2302] 0.75 ml 30% Bis-Acrylamide
[2303] 1.25 ml 1.5 M Tris (pH 8.8)
[2304] 25 µl 20% SDS
[2305] 50 µl 10% APS
[2306] 5 µl TEMED
[2307] 2.9 ml MQ Water

### General Direct Binding ELISA Assay

[2308] The potential of the purified Quad proteins to bind its target protein was confirmed by directing binding ELISA. Briefly, high binding 96 well plates (Corning) were used for coating recombinant target protein (1-5 ug/ml diluted in PBS or as indicated), which were typically stored at 4° C. overnight. Plates are then washed 3 times with 200 ul wash buffer (PBS + 0.1% Tween) and blocked using 200 ul blocking buffer (PBS + 1% BSA) for 1 hour at room temperature. Purified protein samples are typically serially diluted in dilution buffer (PBS + 0.1% BSA) and 100ul/well is added. Samples are incubated at room temperature for 1 hour after which the plate is washed again 3 times using 200 ul wash buffer. Anti-His HRP (Abcam) Detection antibody diluted according to the manufacturer recommendation is added and incubated at room temperature for 1 hour. The plate is washed for the final time using 3×200 ul wash buffer and 50 ul pre-warmed detection reagent (TMB -Sigma) is added per well and the plate incubated in the dark for 10-30 mins. The reaction is stopped by adding 25 ul/well of 1 M sulfuric acid. The absorbance at 450 nm was read using a CLARIOstar microplate reader (BMG Labtech).

### Example 8: Expression of Monospecific Tetravalent dAb Quad

[2309] A multimer format (“Quad” format) where a single domain of an antibody variable fragment (dAb) (VH or VL either Vκ or Vλ) fused to p53 tetramerisation domain is exemplified in this example. The dAb VH sequence for anti-IL17A (sequence adapted from WO 2010/142551 A2) was engineered into a tetravalent dAb Quad format (Quad 57) (Seq ID: 146). Expression vector for Quad 57 was synthesized by Twist Bioscience and expressed in HEK293 cells as described above. Secreted Quad 57 protein was collected from cell supernatant and purified using HisTrap HP column. To demonstrate soluble expression and purity of Quad 57, a small portion of the purified protein (1.5 ug) was separated out on SDS-PAGE gel (FIG. 23). A pure protein could be detected at the expected size (18 kDa) corresponding to Quad 57 confirming soluble expression of a tetravalent dAb Quad protein. A schematic representation of a tetravalent monospecific dAb Quad is shown in FIG. 22-A (ie, embodiment A of FIG. 22A).

### Example 9: Expression and Binding Analysis of Bispecific Tetravalent dAb Quad

[2310] A bispecific tetravalent dAb Quad is exemplified in this example where two different dAb binding domains are linked to p53 tetramerisation domain via the N- and C-terminus and as schematically represented in FIG. 22-C(ie, embodiment C of FIG. 22A).

[2311] In a specific example of a bispecific tetravalent dAb Quad, an anti-TNFa dAb VH binding domain from Ozoralizumab was linked to the N-terminus of p53 tetramerisation domain and an anti-IL17A dAb VH binding domain (sequence adapted from WO2010/142551 A2) was linked to the C-terminus of the p53 tetramerisation domain (Quad 54) (Seq ID: 143). Although in this specific example both the dAb binding domains were VH’s, the dAb binding domains could be Vκ or Vλ or a combination of the different dAb formats.

[2312] To demonstrate whether such a bispecific tetravalent dAb Quad format could be expressed as a soluble protein, expression construct containing dual anti-TNFa and anti-IL17A dAb binding domains were synthesized as a Quad format and expressed in HEK293 cells. Following protein purification from culture supernatant using HisTrap HP column, ~1.5 ug of the purified protein was separated out on SDS-PAGE gel (FIG. 24A). From the SDS-PAGE gel, a pure product at the expected size (30.7 kDa) could be seen confirming expression of soluble bispecific tetravalent dAb Quad.

[2313] To further exemplify the functionality of such bispecific tetravalent anti-TNFa x anti-IL17A dAb Quad, direct binding ELISA assay was performed. High protein binding 96 well plates (coming) were coated with 1 ug/ml recombinant human TNFa protein (Abcam) and direct binding ELISA assay was performed with serially diluted Quad 54 protein using the method described above. A typical sigmoidal dose response curve was yielded from Quad 54 direct binding ELISA with recombinant human TNFa protein with a half-maximal binding at the low pM range (~10 pM) (FIG. 24B). This confirms that not only can bispecific tetravalent anti-TNFa x anti-IL17A dAb Quads could be expressed as soluble proteins, they are also functional in that they can bind their target protein with high binding strength. The high binding strength is likely a measure of the increased avidity gained through tetravalent binding and this highlights an important feature of Quad multivalent molecules.

### Example 10: Expression, Binding and Functional Analysis of Monospecific Tetravalent scFv Quads

[2314] In this example, scFv binding domains for two different targets were selected and linked separately to the N-terminus of p53 tetramerisation domain to generate monospecific tetravalent scFv Quads as schematically represented in FIG. 22-D(ie, embodiment D of FIG. 22B).

[2315] In one example the scFv binding domain was an anti-TNFa where the VH and Vκ sequence was adapted from Humira into a scFv Quad format. To analyse whether the presence of a peptide linker effected the expression and binding of the Quad molecule to its target protein, in this example the anti-TNFa scFv binding domain was linked to the N-terminus of p53 tetramerisation domain either via a (G4S)3 peptide linker (Quad 63) (Seq ID: 147) or without a peptide linker (Quad 51) (Seq ID: 139).

[2316] In another example, the scFv binding domain was an anti-CD20 adapted from Wu et al., (Wu et al. 2001). The anti-CD20 scFv binding domain was engineered into a tetravalent Quad format by linking the binding domain directly to the N-terminus of p53 tetramerisation domain without a peptide linker (Quad 53 Tet) (Seq ID: 141).

[2317] All tetravalent scFv Quads were transfected into HEK293 cells and soluble protein from the culture supernatant were purified using HisTrap™ HP column as described above. A small amount of the purified protein (~1.5 ug) was separated out on SDS-PAGE gels to confirm expression and purity.

[2318] Anti-TNFa scFv Quads (Quads 51 & 63) were found to express well as soluble protein and the presence or absence of the peptide linker joining the scFv to the N-terminus of p53 tetramerisation domain did not appear to effect expression (FIG. 25A). Furthermore the purity of the secreted soluble Quad proteins appears to be highly pure (>99%). To characterize these Quads further, both Quad 51 and Quad 63 were analysed in a direct binding ELISA assay using recombinant human TNFa (Abcam). High binding 96 well plates (Costar) was coated with 1 ug/ml of human TNFa protein and ELISA binding assay was performed using serially diluted Quad 51 and Quad 63 proteins as described above. A dose-dependent increase in binding was observed for both Quad 51 and Quad 63 confirming these anti-TNFa scFv’s were assembled correctly and their native binding functionality were retained in this Quad format. Furthermore, the binding profile for Quad 51 and Quad 63 was found to be highly similar with both Quads having a half-maximal binding concentration in the low pM range (~30 pM) (FIG. 25B). Combinedly, these data confirm the presence or absence of the peptide linker does not effect protein expression or Quad binding strength to their target protein.

[2319] To further functionally characterize the activity of anti-TNFa Quad 51 molecule to neutralize TNFa, a cell-based assay was performed using WEHI-13VAR cells (ATCC), which is highly sensitive to TNFa. The bioassay using WEHI cells was set-up as described below. A monovalent anti-TNFa (W51ScFv) was included in the assay as a control (Seq ID: 150) and Humira was used as a positive control. W51ScFv was generated by modifying Quad 51 where the p53 tetramerisation domain was removed. Expression of W51ScFV was confirmed by SDS-PAGE (FIG. 25C).

[2320] Briefly, WEHI-13VAR cells were seeded at 1 × 10⁴ cells per well in a 96-well plate in RPMI-1640, 10% FBS and incubated overnight at 37° C., 5% CO₂. The media was aspirated from the cells and replaced with media containing 2 ug/ml actinomycin D, 0.1 ng/ml recombinant human TNFα (ab9649, Abcam) and 0-2400 pM Q51, Q35, W51ScFV and Humira. The samples were set up in quadruplicate with no TNFα and no antibody controls. The cells were incubated under standard culture conditions for a further 20-22 hours.

[2321] To assess cell viability, ATP generated by metabolically active cells was quantified using the CellTiterGlo Luminescent Cell Viability Assay (Promega) according to the manufacturers’ instructions. Luminescent signals were measured using a CLARIOstar microplate reader (BMG Labtech). The luminescence signals obtained from the compound treated cells were normalised against the media on controls. The effective dose (ED) at which 50% of the WEHI cells retained viability was calculated and the ED50 for Quad 51, Humira and W51ScFV is summarised in Table 11.

[2322] As expected, Quad 51 having four anti-TNFa binding domains was found to be most effective at neutralising the cytotoxic effect of recombinant human TNFa protein on WEHI cells compared to Humira, which has two binding domains for TNFa. The W51ScFv control having only a single binding domain for TNFa had the highest ED50. The increasing valency of the anti-TNFa molecules for TNFa correlated inversely with a decrease in ED50 values. These data highlights the enhanced functional potency of Quad molecules with increasing valency and this aligns with the general concept of avidity verses potency as reported by numerous studies (Alam et al. 2018; Rudnick & Adams 2009; Adams et al. 2006; Bru nker et al. 2016). Furthermore, the increase in avidity of Quad molecules can be used to drive selectively of tumour associated antigens that are highly expressed on tumour cells and thus limit the on-target off-tumour effect on healthy cells as reported in an example outlined by Slaga et al (Slaga et al. 2018).

[2323] To further demonstrate the ability of anti-TNFa Quad 51 to block TNFa induced activation of Caspase 3, Western blot analysis were performed alongside Humira and W51ScFv as controls. Briefly, WEHI-13VAR cells were seeded at 2.5 × 10⁶ cells per well in a 6-well plate in culture media (RPMI-1640, 10% FBS) and incubated overnight. The media was replaced with media containing 2 ug/ml actinomycin D, 1 ng/ml recombinant human TNFα and 500 pM of Quad 51, W51ScFV and Humira. Culture media only and culture media containing 2 ug/ml actinomycin D were included as controls. The cells were incubated with TNFα and +/- anti-TNFa molecules for 10 hours.

[2324] The cells were lysed using RIPA buffer (50 mM Tris, pH 8.0, 150 mM NaCl, 1% Triton X-100, 0.5% sodium deoxycholate, 0.1% SDS) containing 1 mM DTT and Complete™ EDTA-free protease inhibitor (Roche). Cell lysates were sonicated using a Bioruptor® Pico Sonication System (Diagenode) and the protein concentration of each sample was quantified using the Pierce BCA Protein Assay Kit (Thermo Fisher Scientific). 10 ug of protein was electrophoresed on a 12% Bis-Tris gel and bands were subsequently transferred to Amersham™ Hybond® P 0.45 µm PVDF membranes (GE Healthcare). The membranes were blocked with 10%-BSA-TBST or 5%-milk-TBST before being incubated overnight at 4° C. with appropriate antibodies (anti Caspase-3 (1/1000, CST, 9665) and anti-Cleaved Caspase-3 (1/100, CST, 9664). The membranes were washed with TBST and incubated with anti-rabbit IgG HRP-linked (1/2500, CST, 7074S) secondary antibody for 2 hours at room temperature. Following thorough washing, the membranes were developed using Pierce™ ECL Western Blotting Substrate (Thermo Fisher Scientific) and CL-XPosure™ films (Thermo Fisher Scientific).

[2325] From the Western blots, it can be seen that Quad 51 can effectively neutralise TNFa mediated activation of Caspase-3 with no detectable cleaved Caspase-3, similar to Humira (FIG. 25D). Whereas the monovalent W51ScFv anti-TNFa control molecule with high ED50 value, is not able to completely neutralize TNFa mediated activation of Caspase-3 and this is indicated by the presence of cleaved Caspase-3 in this sample. These data confirm that the mechanism of action of Quad 51 is through a signaling mechanism similar to Humira™. In a second example, the anti-CD20 scFv Quad (Quad 53 Tet) was expressed in HEK293 cells and following purification, protein expression analysis and protein binding assays were performed. SDS-PAGE analysis confirmed soluble expression of Quad 53 Tet as a highly pure protein (>99%) (FIG. 25E). ELISA binding assay using recombinant human CD20 protein (Abcam) using serially diluted Quad 53 Tet protein confirmed a dose-dependent increase in binding. The ability of the anti-CD20 scFv Quad to retain binding to CD20 once again confirms correct assembly of this Quad format into a functional molecule (FIG. 25F).

### Example 11: Expression and Binding Analysis of Monospecific Octavalent scFv Quad

[2326] In this example, the valency of the scFv binding domain was increased from four (tetravalent) to eight (octavalent). This was achieved by linking an scFv to both N- and C-terminus of the p53 tetramerisation domain as schematically represented in FIG. 22-E.

[2327] As described in example 10, the anti-CD20 scFv binding domain was used in this example to construct a monospecific octavalent anti-CD20 scFv Quad (Quad 53 Oct) (Seq ID: 142). In this specific example, scFv’s were linked to the N- and C-terminus of the p53 tetramerisation domain without peptide linkers, however, in other examples of this format, peptide linkers could be introduced at either or both ends to aid flexibility of the binding domain.

[2328] Following expression and purification of Quad 53 Oct protein from culture supernatant, protein expression analysis and ELISA binding assays were performed. Protein separated out on SDS-PAGE gel confirmed soluble expression of Quad 53 Oct with high purity (>99%) (FIG. 26A). ELISA binding assay was also performed using recombinant CD20 and serially diluted Quad 53 Oct protein (FIG. 26B). A dose-depended increase in binding could be seen confirming correct assembly of anti-CD20 scFv in an octavalent format.

[2329] To analyse the effect of increasing valency on target protein binding, scFv anti-CD20 without the tetramerisation domain was constructed to act as a monovalent control (Quad 53 Mon) (Seq ID: 140). Following protein expression and purification, all three Quad 53 anti-CD20 scFv molecules (monovalent, tetravalent and octavalent) were separated out side-by-side on a SDS-PAGE gel (FIG. 26C) and ELISA binding assay was performed (FIG. 26D). With all three Quad 53 molecules, a dose-dependent increase in binding could be seen and the overall increase in binding strength was reflected by the increase in the valency. The octavalent anti-CD20 scFv version was found to have the highest overall binding strength, followed by the tetravalent and then the monovalent version. It is noteworthy, due to the nature of direct binding ELISA where the target protein is densely coated onto 96 well plates resulting in rapid Quad 53 binding saturation to CD20, the true avidity (total binding strength) can not be accurately determined using this method. Despite these limitations of direct binding ELISA, a representative increase in binding could still be observed with increasing valency as seen in FIG. 26D.

### Example 12: Expression and Binding Analysis of Bispecific Tetravalent scFv Quad

[2330] In this example, two different scFv binding domains with specificity for two different target proteins were linked to the p53 tetramerisation domain via the N- and C-terminus to give a bispecific tetravalent scFv Quad as exemplified schematically in FIG. 22-F.

[2331] The specific scFv binding domains used in this example has specificity for anti-TNFa and anti-IL17A. The anti-TNFa scFv sequence was adapted from Humira and the anti-IL17A scFv sequence was adapted from Ixekizumab (Eli Lilly) into a bispecific Quad format (Quad 55) (Seq ID: 144). To confirm soluble expression, Quad 55 was expressed in HEK293 cells and the secreted protein was purified from culture supernatant followed by protein analysis. (FIG. 27A). Protein analysed by SDS-PAGE confirmed soluble expression of this bispecific scFv Quad format with high purity (>99%). To further anaylse whether this format was functional, ELISA binding assay was performed for the anti-TNFa scFv arm (FIG. 6B). A dose-dependent increase in binding of Quad 55 to recombinant human TNFa could be seen confirming Quad 55 was assembled correctly. Furthermore, Q55 appears to have a similar half-maximal binding in the low pM range to that of Quad 51 detailed in Example 10.

### Example 13: Expression and Binding Analysis of Bispecific Tetravalent scFv X dAb Quad

[2332] In this example, two different binding domain formats with specificity for two different target proteins were linked to the N- and C-terminus of p53 tetramerisation domain respectively, as exemplified schematically in FIG. 22-G.

[2333] The first binding domain was an anti-TNFa scFv as detailed in Example 12, which was linked to the p53 tetramerisation domain via the N-terminus. The second binding domain was an anti-IL17A dAb sequenced, which was linked to the p53 tetramerisation domain via the C-terminus as detailed in Example 9 (Quad 56) (Seq ID: 145).

[2334] Soluble expression of this bispecific tetravalent scFv x dAb Quad format was confirmed by analysing the purified protein on SDS-PAGE gel (FIG. 28A). In additional ELISA binding assay was performed for the anti-TNFa binding arm (FIG. 28B), where a dose-depended increase in binding was observed. This confirmed correct expression and assembly of this bispecific scFv × dAb Quad format.

[2335] In the examples above (Examples 10, 12 & 13) different bispecific Quad formats (Quads 54-56) with specificity for anti-TNFa x anti-IL17A were produced and analysed for expression and functionality by ELISA binding assay for the anti-TNFa binding arm. From the data presented thus far, it is clear that the p53 tetramerisation domain is highly versatile and amenable to fusion with different binding domains at either or both N- and C-terminus. To compare the functional binding strengths of Quads 54-56, the ELISA binding assay data for the anti-TNFa binding arm of the different bispecific Quads were plotted side-by-side (FIG. 28C). The dose-response curves for all three bispecific Quad formats appear to be highly similar indicating that the binding domain format (scFv or dAb) does not affect binding. This further highlights the versatility and utility of the p53 tetramerisation domain to generate highly pure multivalent soluble proteins with high binding strength.

### Example 14: Expression and Binding Analysis of Tetravalent Monospecific Ig scFv Quad V1

[2336] In this example, an scFv binding domain was linked to the lower hinge/CH2 domain of IgG1 Fc without the core and upper hinge region to generate a scFv monomeric Ig Fc (scFv-mFc), ie wherein the Fc does not pair with another Fc when a multimer is formed using the polypeptide monomer. Typically a CXXC motif comprising cysteine residues present in the core hinge region is responsible for forming inter-chain disulfide bonds. Thus, by excluding the core hinge region, the Fc region is restrained from forming a tightly packed homodimer structure typically found in native IgG antibodies. The lower hinge/CH2 domain was kept intact to allow proper interaction with Fcγ-receptors required for effector function.

[2337] The scFv-mFc was engineered into a Quad format by linking it to the p53 tetramerisation domain via the N-terminus to generate a tetravalent monospecific Ig scFv Quad termed version 1 as schematically represented in FIG. 22-I(ie, embodiment I shown in FIG. 22D).

[2338] In this example the upper hinge was also removed, but in other examples the upper hinge region can be optionally retained completely or only partially kept intact to generate dAb monomeric Ig Quads (exemplified schematically in FIGS. 22-H, L, W, X, Y, Z, AA, AB & AC), scFv monomeric Ig Quads (exemplified schematically in FIGS. 22-I, M, X, & AA) and Fab monomeric Ig Quads (exemplified schematically in FIGS. 22-J, K, N & O) with monospecific, bispecific, trispecific or tetraspecific specificity. Although in this specific example, human IgG1 was used as an example, the Fc region could be any of the other IgG isotypes including IgG2, IgG3, gG4 or derivative thereof. The amino acid sequences encoding human IgG hinge regions are shown in Table 12.

[2339] The scFv binding domain used in this specific example was that of an anti-CD20 described in Example 10. The anti-CD20 scFv was linked to the lower hinge/CH2 domainof the Fc via a peptide (G4S)3 linker. The p53 tetramerisation domain was linked directly to the C-terminus of the CH3 domain without any peptide linkers (Quad 64) (Seq ID: 148). An optional linker could be included at this junction between the CH3 domain and the multimerisation domain to provide flexibility.

[2340] Following Quad 64 expression and purification, protein was quantified and analysed by SDS-PAGE (FIG. 29A). Protein quantification using Nanospec confirmed high protein yield after HisTrap HP column purification with protein yield equivalent to 130 mg/L. In addition, a single protein band at the expected size (58.2 kDa) as seen on the SDS-PAGE gel confirmed expression of a highly pure (>99%) tetravalent monomeric Ig scFv Quad protein. To analyse whether the expressed Ig Quad protein was assembled correctly, ELISA binding assay was performed (FIG. 29B). Quad 64 was found to retain binding to recombinant human CD20 in a dose-dependent manner confirming that it was assembled correctly and functionally active.

### Example 15: Expression and Binding Analysis of Tetravalent Monospecific Ig scFv Quad V2

[2341] In this example, a different version of the tetravalent monomeric Ig scFv Quad described in Example 14 was constructed where the anti-CD20 scFv binding domain was linked directly to the N-terminus of the p53 tetramerisation domain. The mFc containing the lower hinge, CH2 and CH3 domains was directly linked to the C-terminus of the p53 tetramerisation domain. This version of tetravalent monomeric Ig scFv Quad is termed version 2 and is schematically represented in FIG. 22-M(ie, embodiment M shown in FIG. 22F).

[2342] Although in the specific example described below, the upper hinge was not included, in other examples the upper hinge region can be optionally retained completely or only partially kept intact.

[2343] In other examples, the version 2 configuration could contain dAb binding domains as exemplified schematically in FIGS. 1-L, X, Z & AA, producing Quad molecules with monospecific, bispecific or trispecific specificity. In another example, the binding domain could be a Fab as exemplified schematically in FIGS. 22-N & O. In yet another example, version 2 could be made without mFc to give tetravalent Fabs either as monospecific (exemplified schematically in FIGS. 22Q & R-) or bispecific (exemplified schematically in FIG. 22-S).

[2344] The expression construct for the tetravalent monomeric Ig scFv Quad version 2 specific for CD20 (Quad 65) (Seq ID: 149) was expressed in HEK293 cells and the soluble secreted protein was analysed by SDS-PAGE. Protein quantification using Nanospec confirmed high protein yield after HisTrap HP column purification with protein yield equivalent to 160 mg/L. In addition, a single protein band at the expected size (57.2 kDa) as seen on the SDS-PAGE gel confirmed expression with high purity (>99%) (FIG. 30A). The integrity of the expressed protein was analysed by ELISA binding assay. Recombinant human CD20 protein was used in a direct binding ELISA using serially diluted Quad 65 protein. Quad 65 was found to bind CD20 in a dose-dependent manner (FIG. 30B) confirming it assembled correctly and functionally active.

[2345] The data outlined above and in Example 14, represents the first examples of soluble and functional expression of tetravalent monomeric Ig molecules. Such multivalent monomeric Fc formats would have several advantages over scaffold and antibody fragment based molecules lacking Fc. Firstly, the presence of an Fc region in a monomeric Quad format would allow neonatal Fc receptor (FcRn) binding providing an extended half-life of these molecules in-vivo. Secondly, the presence of an Fc region would have the ability to bind multiple Fc receptors to induce effector functions such as antibody-dependent cell-mediated cytotoxicity (ADCC) and complement-dependent cytotoxicity (CDC) as reported for monovalent monomeric Ig Fc molecules (Ying et al. 2017; Ying et al. 2012). Thirdly, the proof-of-concept data outlined in this example suggest that any given monoclonal IgG antibody could be rapidly formatted into a multivalent monomeric Ig Quad format as schematically represented in FIGS. 22-J, K, N & O). With these formats retaining the native binding domain architecture of an IgG antibody, multivalent monomeric Ig Quad formats would have substantially increased binding strength for its target protein due to the increased avidity gained through multivalency. Such monomeric Ig Quad format will provide novel class of therapeutic molecules with enhanced target protein neutralization potential (Boruah et al. 2013; Shen et al. 2019) as well as having enhanced efficiency to cross-link cell surface receptor to mediate apoptosis (Li et al. 2018) and induce signaling through receptor super-clustering with enhanced agonistic potentials (Mayes et al. 2018).

### Example 16 Expression of Octavalent Bispecific Quads

[2346] In a specific example of an octavalent bispecific Quad, dAb binding domains for PD-L1 and 4-1BB were used for the dual targeting of an immune checkpoint inhibitor and an immune co-stimulatory molecule for the treatment of cancers. In other examples, dAb binding domains could have specificity for any immune checkpoint inhibitor and any co-stimulatory molecule or a mixture thereof to provide either a dual checkpoint inhibitor bispecific multimer (e.g. PD-L1 x CTLA-4) or a dual checkpoint inhibitor and immune co-stimulatory bispecific multimer (e.g. PD-L1 x 4-1BB) or a dual immune co-stimulatory bispecific multimer (e.g. 4-1BB x OX40).

[2347] To exemplify octavalent bispecific Quads, two different versions were constructed to demonstrate soluble Quad protein expression. In one format, the PD-L1 and 4-1BB dAb binding domains were linked to a p53 multimerisation domain as a tandem dAb at either the N- or C-terminus as schematically represented in FIG. 31-A.

[2348] In a second example of an octavalent bispecific multimer, the dAb binding domains for PD-L1 and 4-1BB were linked to the p53 tetramerisation domain at opposite ends respectively as schematically represented in FIG. 31-B.

[2349] The dAb binding domain sequence for PD-L1 and 4-1BB were adapted from WO2017/123650A2. In the first version of an octavalent bispecific Quad, a tandem dAb containing anti-PD-L1 and anti-4-1BB in a N-C terminus orientation was linked to the N-terminus of p53 tetramerisation domain without any peptide linkers. This version is referred to as Quad 68 (SEQ ID NO: 190). However, in other examples, the tandem dAb can be linked to the tetramerisation domain via an optional peptide linker and as further described in Table 8-P.

[2350] In a second version of octavalent bispecific Quad multimer, the anti-PD-L1 dAb was linked to the N-terminus of p53 tetramerisation domain and the anti-4-1BB dAb was linked to the C-terminus. This version is refered to as Quad 69 (SEQ ID NO: 191). In this specific example the dAbs were linked to the tetramerisation domain without any peptide linkers. However, in other examples, dAbs can be linked to the tetramerisation domain via an optional linkers and as further described in Table 8-C.

[2351] The expression construct for Quads 68 and 69 were expressed in HEK293 and the secreted soluble proteins were purified from cultured supernatant. The purified Quad proteins were analysed by SDS-PAGE (FIGS. 31-C & D). Protein quantification of Quad 68 and Quad 69 using Nanospec confirmed high protein yield after HisTrap HP column purification with protein yield equivalent to 297 mg/L and 360 mg/L respectively. The presence of a single protein band for both Quad 68 and Quad 69 at the expected size (32 kDa) as seen on the SDS-PAGE gel confirmed expression with high purity (>99%) (FIGS. 31-C and D).

[2352] The configuration of the dAbs either in tandem (as in Quad 68) or in opposite orientation (as in Quad 69) are anticipated to engage with cancer cells via PD-L1 with higher potency and selectively than to T cells expressing 4-1BB. Therefore, T cells will preferentially be recruited to cancer cells only once the cancer cells are engaged with the Quad molecule allowing selective T cell activation with improved safety profile.

### Example 17: Expression of Tetravalent Monomeric Ig dAb Quad and Octavalent Fab-Like dAb Monomeric Ig Quad

[2353] A dAb VH with specificity for TNFα as detailed in Example 9 was also used in this example to generate two new versions of monomeric Ig dAb Quads. In the first version, anti-TNFα dAb VH was linked directly to IgG CH1. The CH1 region was linked to the IgG1 Fc where the hinge region was modified so that the core hinge was removed (SEQ ID NO: 168 hinge sequence was used). The Fc region was linked to the N-terminus of the p53 TD domain yielding Quad 92. The presence of CH1 region in Q92 allowed for the generation of a second version of monomeric Ig Quad where Q92 when co-expressed with anti-TNFα dAb linked to Kappa light chain constant domain yielded an octavalent anti-TNFα Fab-like dAb monomeric Ig Quad (Q93) as schematically represented in FIG. 33A. The molecular design of Q92 and Q93 is schematically represented in FIGS. 33B&C.

[2354] Q92 alone or Q92 plus Q93 were expressed in HEK293 cells and the Quad proteins were purified directly from the culture supernatant. The purified proteins were analyzed by SDS-PAGE where pure products at the expected molecular weight (Q92 (tetravalent) - 55 kDa and Q92+Q93 (octavalent) - 79 kDa) could be seen confirming soluble expression of these Quad formats (FIG. 33D). Although in this specific example, the dAb tetravalent version retained the CH1 region, in another example the CH1 domain could be removed to generate a slightly modified version of tetravalent dAb Quad as schematically represented in FIG. 22F (embedded in Figure as L).

### Example 18: Expression of Monospecific and Bispecific Octavalent Tandem dAb Monomeric Ig Quads

[2355] In this example, two different versions of monomeric Ig Quads were generated similar to that exemplified in Example 14. However, instead of using scFv as binding domains, in this specific example antibody single domains (VH) were linked in tandem with specificity for either PDL1 alone or PDL1 plus 4-1BB. In the first of these examples, a bispecific octavalent anti-PDL1/4-1BB monomeric Ig dAb Quad (Q113) was generated by linking in tandem an anti-PDL1 dAb with an anti-4-1BB dAb separated by a flexible linker. This tandem bispecific binding module was linked to the lower hinge/CH2 region of IgG1 Fc without the core hinge region to generate a tandem dAb monomeric Ig Fc (ie, the resulting polypeptide comprised (in N- to C-terminal direction) an anti-PDL1 dAb, an anti-4-1BB dAb, lower hinge/CH2 region of IgG1 Fc without the core hinge region and IgG1 CH3) . The Fc region was linked to the N-terminus of p53-TD domain to generate a bispecific tandem dAb monomeric Ig Fc Quad as schematically represented in FIG. 22O. In this example, the binding valency of both the anti-PDL1 and anti-4-1BB dAb domains were tetravalent for their target protein. This is an example of a multivalent 4 + 4 (octavalent) bispecific antibody containing Ig Fc region. The second example was exactly the same as Q113, except the tandem dAb consisted only of anti-PDL1 dAb domains generating an octavalent anti-PDL1 monomeric Ig Quad (Q114).

[2356] Following Quad 113 and Q114 expression in HEK293 cells and purification of proteins from culture supernatant, the recovered proteins were analysed by SDS- PAGE (FIGS. 34A & B). For both Q113 and Q114, a single pure protein band at the expected molecular weight was observed confirming expression of these monomeric Ig Quads as highly pure (>99%) soluble Quads proteins.

### Example 19: Expression of Fab Monomeric Ig Quad

[2357] In this specific example, monomeric Ig Quads were produced from IgG monoclonal antibodies where the native pairing of the variable heavy chain (VH) and variable light chain (VL) was kept intact. This was achieved by taking the Fab fragment of IgG monoclonal antibody and converting it into a monomeric Ig Quad as schematically represented in FIG. 22E (embedded in Figure as J). To exemplify such Quad format, Fab fragments from two clinically approved monoclonal antibodies were used (adalimumab (Humira™) and avelumab (Bavencio™)). The VH-CH1 domain of either Humira or Avelumab was linked to the lower hinge/CH2 region of IgG1 Fc without the core hinge region. The Fc region was linked to the N-terminus of p53-TD domain to generate the monomeric Ig Quad chain. To generate Humira and avelumab Fab monomeric Ig Quad, the native light chain VL-CL was co-expressed with the respective monomeric Ig Quad chain in HEK293 cells.

[2358] Fab monomeric Ig Quad proteins were purified from the culture supernatant and analysed initially by SDS-PAGE (FIGS. 35A & B). Detection of a single protein band at the expected molecular weight on a non-reduced denaturing SDS-PAGE gel corresponding to either Humira or avelumab Fab monomeric Ig Quad, confirmed both soluble expression and high purity of these monomeric Ig formats. The absence of any detectable free HC or free LC in these Fab monomeric Ig Quad protein preps further confirmed the high stability of these formats. To confirm the native molecular mass and oligomeric state of these Fab monomeric Ig Quad proteins, Humira Fab monomeric Ig Quad protein was analysed by size-exclusion chromatography (FIG. 35C). The size exclusion chromatography profile for Humira Fab monomeric Ig Quad protein had a clear dominant peak eluted at the expected volume consistent with the tetrameric molecular weight of 315.8 kDa. These data further confirm the high purity of these Quad proteins, which are stable and present in a homogeneous tetrameric form without the presence of any aggregates. Further examples of Fab monomeric Ig Quad could be generated from any given monoclonal antibody where the intact Fab is used to generate Quads without altering the native VH and VL pairing or it’s native antigen binding potential.

### Example 20: Expression of Extracellular Protein Domain as Monomeric Ig Quads (Q96)

[2359] In the above examples, antibody fragments were used to generate Quads. In this specific example the versatility of p53 TD domain was demonstrated further whereby extracellular domains of cell surface receptors were multimerised into a Quad format without affecting its ability to bind its natural ligand. To exemplify this, the soluble extracellular domains used in the VEGF trap aflibercept (Eylea™) was used as an example. The Ig domain 2 from VEGFR1 and Ig domain 3 from VEGFR2 similar to Eylea was linked to monomeric Ig Quad similarly to that exemplified in Examples 17-19 and as schematically represented in FIG. 36A (Q96).

[2360] Q96 was expressed in HEK293 cells and soluble protein was purified directly from the culture supernatant. SDS-PAGE analysis confirmed expression of Q96 as a highly pure Quad with a single protein band at the expected molecular weight (FIG. 36B). The integrity of Q96 was analysed further by ELISA binding assay as described above to confirm binding to VEGF-A ligand. ELISA plates were coated with VEGF-A at 0.5 ug/ml and serially diluted (1 in 3 folds diluted starting from 5 nM) Q96 protein was added to the coated VEGF-A plate. Anti-His HRP detection antibody was used for detection of Q96 binding to VEGF-A. Q96 bound VEGF-A in a dose dependent manner confirming this format containing extracellular domains of VEGFR1 and VEGFR2 assembled correctly and it retained it’s native ligand binding potential (FIG. 36C).

### Example 21: Expression, Binding and Functional Potency of Non-Ig Tetravalent and Non-Ig Octavalent Anti-TNFα dAb Quads

[2361] Similar to Example 8, antibody single domains were used to generate monospecific tetravalent and octavalent Quads without IgG Fc (referred to herein by shorhand “non-Ig”). Anti-TNFα dAb VH was linked directly to p53 TD at either the N-terminus to generate tetravalent Quad (Q88 tetravalent) or at both N- and C-terminus to generate octavalent anti-TNFα dAb Quad (Q88 octavalent) as schematically represented in FIG. 22A (embedded in figure as A and B respectively). The original anti-TNFα dAb without the TD domain was also produced for use as a monovalent control (Q88 monovalent). The molecular designs are schematically shown in FIG. 37A, which also highlights the modular design of these Quads.

[2362] Following expression in HEK293 cells and Quad protein purification directly from culture supernatant, initial protein analysis was carried out by SDS-PAGE. The multivalent anti-TNFα dAb Quads expressed as highly pure proteins as judged by a single band on the SDS-PAGE gels corresponding to the expected molecular weight (FIG. 37B). To further analyse these multivalent Quads and the effect avidity has on TNFα binding and TNFα neutralization, ELISA binding assay and WEHI cell-based bioassay were performed as described in Examples 9 and 10. Increase in TNFα binding strength can be seen for both tetravalent and octavalent anti-TNFα dAb Quads compared to the anti-TNFα monovalent control in ELISA binding assay (FIG. 37C). Surprisingly, the TNFα binding potential between the octavalent and the tetravalent versions could not be resolved in the ELISA binding assays. Similarly, surprisingly the binding strength for the tetravalent and octavalent anti-TNFα dAb monomeric Ig Quad versions detailed in Example 17 could not be resolved and only a small increase in TNFα binding strength was observed in ELISA binding assay (FIG. 37D). This may be because the binding strength is greatly enhanced and the tetramethylbenzidine-based colorimetric signal is rapidly saturated by these multivalent Quads, and thus the dynamic detection range for this ELISA binding assay is not adequate to differentiate the enhanced binding strength beyond a certain point.

[2363] Increase in TNFα binding domain valency was further investigated in WEHI bioassay where the potency of the anti-TNFα Quad molecules to neutralize TNFα-mediated cytotoxicity of WEHI cells were compared. WEHI bioassay was performed as described in Example 10 using both non-Ig and Ig-like anti-TNFα dAb Quads (FIGS. 37E & F). Unlike the ELISA binding assay, in this cell-based bioassay, surprisingly a substantial increase in potency can be seen with increasing anti-TNFα binding domains including major difference in potencies between the tetravalent and octavalent versions. The EC₅₀ values and the fold enhancement of potency of these molecules are summarized in Table 15.

### Example 22: Expression and Functional Potency of Non-Ig Dodeca and Hexadeca Valent Anti-TNFα dAb Quads

[2364] To extend the concept of multivalency further and beyond tetra- and octa-valency, two further formats of anti-TNFα dAb Quads were generated with either 12 (AKA dodeca, 12-valent or 12-mer herein) or 16 (hexadeca, 16-valent or 16-mer herein) anti-TNFα dAb binding domains in a non-Ig format. The modular design and structural arrangements of these Quads can be seen in the schematic illustration in FIGS. 38A&B.

[2365] In the dodeca version, the first chain contained tandem anti-TNFα dAbs linked to IgG CH1, which in turn is linked to the TD domain (Q142). The second chain contained a single anti-TNFα dAb linked to either kappa (Q135) or lambda (Q136) light chain constant region. Dodeca-valent Quads were generated by co-expressing the two chains in HEK293 cells where heterodimerisation of the two chains occurred through interaction between CH1 and C-kappa or C-Lambda constant region. The TD domain allowed tetramerisation of these two assembled chains into a tetramer.

[2366] For the hexadeca-valent anti-TNFα dAb Quad, the first chain was exactly the same as the dodeca valent format, however, the second chain contained a tandem anti-TNFα dAb linked to either kappa (Q145) or lambda (Q144) light chain constant region. Co-expression of these two chains allowed generation of hexadeca-valent anti-TNFα Quads.

[2367] The dodeca- and hexadeca anti-TNFα dAb Quads were expressed in HEK293 cells and the Quad proteins were purified directly from culture supernatant. The purified proteins were analysed by SDS-PAGE (FIG. 38C). The presence of a predominant protein band at the expected molecular weight confirmed these multivalent anti-TNFα dAb Quads can be expressed as highly pure soluble Quad proteins. Furthermore, it confirmed that these multivalent Quads can be generated using either kappa or lambda light chain constant region.

[2368] WEHI bioassay was performed using the purified dodeca- and hexadeca anti-TNFα dAb Quads and the TNFα neutralization potency was compared to the monovalent anti-TNFα dAb control (FIGS. 38D&E). The increase anti-TNFα dAb binding domain valency in the dodeca-and hexadeca-valent Quad formats substantially increased the TNFα neutralization potency. The EC₅₀ of these Quads are summarized in Table 16.

[2369] Thus, it has been demonstrated that constructs of the invention can surprisingly achieve highly significant increases in antigen binding potency (762-fold in Table 16, for example) and advantageously this can be achieved using different types of binding site (eg, dAb or Fab-like), with or without antibody Fc presence, with possibility of repurposing clinically approved antibodies to retain their tested binding sites and at very high purity levels (almost 100% purity).

### Example 23: Expression Non-Ig Tetravalent Fab Quad

[2370] In example 19 production of tetravalent Humira Fab monomeric Ig Quad was exemplified. In this specific example, Humira Fab with intact light chain (LC) and heavy chain (HC) but without Fc region (non-Ig version) was generated. The p53 TD domain was linked at the C-terminus of Humira HC CH1 domain where the hinge region was modified to be devoid of core hinge (ie, upper hinge sequence without core or lower hinge sequence; SEQ ID NO: 183 was used). Co-expression of this modified HC with the native Humira LC, allowed generation of tetravalent Humira Fab-TD with significantly reduced molecular size compared to the Humira Fab monomeric Ig-TD version. A schematic structural representation of Humira Fab-TD is shown in FIG. 40A. “Non-Ig” multimer refers to Quad multimers where the starting monomeric building block does not contain an Fc, as suppose to an “Ig-like” multimer where the starting monomeric building block contain Fc.

[2371] The Humira Fab-TD Quad was expressed in HEK293 cells and the Quad protein was purified directly from culture supernatant. The purified protein was analysed by SDS-PAGE (FIG. 40B). The presence of a single protein band at the expected molecular weight confirmed that Humira Fab-TD could be expressed as a soluble protein with high purity (>99% pure).

[2372] To further characterize this Quad protein, TNFα binding assay using ELISA and TNFα neutralization potential using WEHI bioassay was performed. As a control Humira Fab was used as a monovalent control. From the ELISA binding assay, it can be seen Humira Fab-TD could bind TNFa with higher binding strength than the Humira Fab monovalent control (FIG. 40C). Similar in the TNFα neutralization bioassay, Humira Fab-TD was able to neutralize TNFα mediated toxicity at higher potency than Humira Fab monovalent control (FIG. 40D). These data confirm that by increasing the valency, the functional affinity is increased resulting in stronger binding and this also enhances the functional potency of Quads compared to the monovalent control.

### Example 24: Octavalent Fab as Non-Ig and Ig-Like Quads

[2373] In the examples above, Fabs from antibodies were used to generate tetravalent Quads either as Ig-like (Example 19) or non Ig-like (Example 23). Further iterations of Fab Quads can be made to generate Fabs with octavalent valences either as Ig-like or non Ig-like.

[2374] To generate octavalent non Ig-like Fab Quads, a Fab with an intact hinge region will be used where p53 TD domain is linked directly to the hinge region optionally via a flexible peptide linker. The intact core hinge region will allow homodimerization of the Fab-TD when co-expressed with its native LC to generate F(ab′)₂ and as such the monomeric building block will be bivalent. In turn, the TD domain will allow tetramerization of the F(ab′)₂ to generate an octavalent Fab Quad as schematically shown in FIG. 41A.

[2375] Similarly, to generate octavalent Ig-like Fab Quads, a TD, eg, a p53 TD domain, will be linked directly to the C-terminus of CH3 domain of an unmodified HC of a predetermined antibody via an optional peptide linker. When this is co-expressed with its native LC from the antibody, the monomeric building block will effectively resemble a fully assembled Ig antibody with p53 TD domains linked to it at the C-terminus of the HC of the assembled antibody. The TD domain in turn will allow tetramerization of the monomeric building blocks to generate an octavalent Fab Ig-like Quad as schematically shown in FIG. 41B. This embodiment is useful to tetramerize any predetermined antibody, such as any predetermined antibody disclosed herein. Thus, for example, a clinically approved antibody can be formatted according to the invention using SAM (eg, TD) mulimerisation to produce a multimer with many more than 2 binding sites for the cognate antigen. For example, the antibody can be bococizumab, alirocumab or evolocumab. In an alternative, instead of using an antibody with SAM (eg, TD), one can use an antigen-binding trap that comprises one or more antigen binding sites and an Fc. For example, one can use aflibercept-SAM as a monomer or aflibercept-TD (such as a p53 or homologue TD as disclosed herein). Thus, a tetramer of aflibercept will be formed by multimerization of the TDs.

[2376] Thus, an embodiment provides an antibody comprising a heavy chain, wherein the heavy chain comprises a SAM, eg, a TD (such as a p53 or homologue TD as disclosed herein). The TD may be at the C-terminus of the heavy chain. For example, the heavy chain comprises (in N-to C-terminal direction) a VH, an antibody CH1, a hinge, a CH2, a CH3 and a SAM (eg, a TD). In an example, the heavy chain is paired with a light chain (eg, wherein the light chain comprises (in N-to C-terminal direction) a VL and an antibody CL), wherein a VH and VL comprised by the heavy and light chain pair form an antigen binding site. In an example, the antibody is a 4-chain antibody, such as comprising first and second copies of the heavy and light chain pairs (ie, a first heavy chain paired with a first light chain, a second heavy chain paired with a second light chain, wherein each pair comprises a VH/VL antigen binding site, and wherein the heavy chains are paired together (such as via disulphide bonding in the constant region)). In an example, there is provided a tetramer of such an antibody, wherein the heavy chain of each antibody comprises a TD at its C-terminus and 4 copies of the antibody are tetramerised by the TDs. See, eg, FIG. 41B.

[2377] In an example, there is provided an antibody light chain comprising in N-to C-terminal direction) an antibody V domain (eg, a VL, such as a Vκ or a Vλ; or a VH), an antibody CL and a SAM, eg, a TD (such as a p53 or homologue TD as disclosed herein). For example, there is provided a multimer (eg, a tetramer) of such a light chain, optionally wherein the light chain (or each light chain in the multimer) is paired with a second antibody chain comprising (in N- to C-terminal direction) another V domain and a CH1, wherein the V domain and CL of the light chain are paired respectively with the other V domain and CH1.

### Example 25: Expanding Antigen Specificity Through Multimerisation

[2378] Reference is made to FIGS. 42 to 44 which demonstrate the surprising effect of multimersation to increase valency of binding sites for a cell-surface human receptor (target X). Antibodies (benchmark dAb or 4-chain antibody) having one or two binding sites for X do not bind target Y (X and Y each being cognate receptors for ligand Z). Multimers of the invention were produced each comprising 4 or 8 anti-X binding sites based on such sites of the dAb or 4-chain antibody; p53 was used as a TD. It was surprisingly found that the multimers of the invention could bind to target X and Y. X=BCMA, Y-TACI and Z=APRIL. BCMA is also known as B-cell maturation antigen (BCMA or BCM), also known as tumor necrosis factor receptor superfamily member 17 (TNFRSF17). TACI is 1so known as transmembrane activator and CAML interactor (TACI), also known as tumor necrosis factor receptor superfamily member 13B (TNFRSF13B). APRIL is also know as A proliferation-inducing ligand (APRIL), also known as tumor necrosis factor ligand superfamily member 13 (TNFSF13).

[2379] Summary:
[2380] Different anti-X antibodies currently under clinical investigation were converted into Quads (ie, multimers of the invention)
[2381] All anti-X Quads expressed well and bound target X as expected
[2382] Unexpectedly when benchmark and Quad versions of the anti-X were tested for target Y binding, both Type 1 & 3 versions bound Y when multimerised according to the invention (no such Y binding seen with benchmarks)
[2383] Multimerised Anti-X Quads are very interesting as they can bind and neutralize a second receptor (which mimics the natural ligand)
[2384] Given an antibody can bind a specific epitope, multimers of the invention could potentially be used to mimic ligands that bind multiple receptors or ligands due to enhanced binding strength A further application for multimers of the invention therefore could be in virus neutralization such as HIV or COVID 19 where virus evolves through mutations - normal bivalent antibody will have reduced binding towards the virus as it evolves and may not be picked up in screens using different virus isolates; see Example 37: Anti-SARS-CoV-2 Quads to Combat Viral Mutation where multimerization enables an anti-spike multimer to surprisingly bind to different mutated forms of SARS-CoV-2 spike. This will be useful for binding to first and second different versions of the SARS-CoV-2 virus, useful for providing resistance to evolving mutation of the virus.
[2385] Multimerisation technology of the invention could be used to identify and isolate virus neutralizing antibodies from surviving patients (ie, patients partially or completely resistance to a virus or who show reduced or no symptoms thereof).
[2386] Multimers of the invention could be used to develop antibodies with broader/stronger neutralization potential for viruses than a normal IgG antibody

### Example 26: Expanding Medical Utility of Binding Sites Through Multimerization

[2387] This example demonstrates how advantageously multimerization of the invention can repurpose a binding site which otherwise would not be useful or much less useful for medical use (eg, for treatment or prophylaxis of a disease or condition mediated by or associated with an antigen to which the binding site binds).

[2388] A multimer was produced by multimerising copies of a polypeptide. The polypeptide had the sequence of CR3022 VH Fab-TD shown in Table 23, and comprised (in N- to C-terminal direction) a single copy of the VH domain of CR3022, and a human p53TD. Each polypeptide was paired with a light chain, wherein the light chain comprised (in N- to C-terminal direction) a single copy of the VL domain of CR3022 and a human Ck domain.

[2389] ELISA was carried out using the example assay method given above. Briefly, for FIG. 46, High binding ELISA plates were coated with either 100 ng/well of SARS CoV-1 RDB or SARS-CoV-2 RBD protein and incubated at 4° C.entigrade overnight. After blocking with 1% BSA for 1 hour at room temperature, plates were washed 3 times with PBS Tween and 100 ul/well serially diluted CR3022 IgG1 or CR3022-TD Quad was added and incubated at room temperature for a further 1 hour. The plates were washed again 3 times. HRP Protein L was added to detect CR3022 antibodies bound to RBD protein.

[2390] CR3022 is a derivative of a human antibody isolated from a patient who recovered from SARS-CoV-1 infection. This antibody is known to bind the receptor binding domain (RBD) of CoV-1 strongly. It also cross-reacts with the RBD of CoV-2 strain but with significantly lower binding affinity as reflected in the above data. However the multimer version of CR3022 according to the invention massively improves the cross-reactive binding to RBD of CoV-2 and well as improving binding to the RBD domain CoV-1 strain (FIG. 46). This makes the mulimter version of the CR3022 binding site a favorable candidate for developing as a novel SARS-CoV-2 neutralizing biologic compared to Ig antibodies. The mulimter version of the CR3022 binding site comprised 4 copies of the VH/VL antigen binding site of CR3022, as opposed to the 2 binding sites on the CR3022 Ig.

### Example 27: Expanding Assay Utility of Binding Sites Through Multimerization

[2391] This example demonstrates how advantageously multimerization of the invention can repurpose a binding site which otherwise would not be useful or much less useful for assay use (eg, detecting a pathogen or antigen that mediates, causes or is adversely associated with a disease or condition in a subject). Through multimerization of the invention, very high-order multimers (eg, containing 8-24 copies of a binding site) can easily be achieved in a stable multimer that can be readily expressed, such as in eukaryotic expression systems and host cells (as demonstrated in the exemplification above). The high-order multimers usefully can repurpose binding sites that individually have relatively low binding strength for an antigen, wherein in the multimers an avidity effect is produced rendering the combined binding strength of copies of the binding site well suited to very sensitive assay detection of low levels of antigens in samples. Usefully, for example, we demonstrate this even for very diluted samples where the antigen is at very low concentration. This is advantageous, for example where the antigen is an antigen of a pathogen (eg, a virus, bacterium or fungus that causes disease, such as in humans, animals or plants); or where the antigen is comprised by antibodies produced by a human or animal subject in response to immunisation, such as in response to a pathogen or a human protein in the subject.

[2392] A multimer was produced by multimerising copies of a polypeptide. The polypeptide had the sequence of ACE2(18-615) Ig-TD shown in Table 24, and comprised (in N- to C-terminal direction) a single copy of the ACE2 amino acids 18-615, a human hinge region, a human CH2, a human CH3 and a human p53TD.

[2393] ELISA was carried out using the example assay method given above. Briefly, for FIG. 47, High binding ELISA plate was coated with 100 ng/well of ACE2 Ig-TD Quad protein and incubated at 4° C.entigrade overnight. After blocking with 1% BSA for 1 hour at room temperature, plates were washed 3 times with PBS + 0.1% Tween and 100 ul/well serially diluted SARS-CoV-2 Spike Trimer or SARS-CoV-2 RBD was added and incubated at room temperature for a further 1 hour. The plates were washed again 3 times and anti-His HRP conjugated antibody was used to detect either spike trimer or CoV-2 RBD bound to ACE2 Ig-TD.

[2394] ELISA was carried out using the example assay method given above. Briefly, for FIG. 48, High binding ELISA plate was coated with 100 ng/well with ACE2 Ig-TD Quad protein and incubated at 4 oC overnight. After blocking with 1% BSA for 1 hour at room temperature, plate was washed 3 times with PBS + 0.1% Tween and 65 ul/well SARS-CoV-2 spike trimer or SARS-CoV-2 RBD at 5 nM fixed concentration was added to each well and incubated at room temperature for 1 hour. After another 3 washes using PBS + 0.1 % Tween, 65 ul of serially diluted serum starting from 1 in 100-fold dilution was added and plate incubated at room temperature for 1 hour. The plate was washed again 3 times. HRP Protein L was added to detect SARS-CoV-2 specific seroconverted human antibodies in serum.

[2395] Spike glycoprotein is naturally assembled into a trimer. It can be produced recombinantly as a trimer or only the RBD domain can be produced as a monomer for use in in vitro assays. The spike protein binds ACE2 receptor as the initial step in the infection process. Thus, ACE2 can be potentially used as a decoy receptor to neutralize coronavirus. In this experiment, a tetravalent ACE2 Ig-TD multimer Quad (ie, an example of a multimer comprising more than 2 binding sites; this example had 4 ACE2 extracellular proteins) was generated and used to capture the two recombinant forms of the spike protein for comparison. Strikingly, ACE2 Ig-TD Quad binds the trimeric form, which is more analogous to the native form with significantly enhanced binding strength than the RBD domain alone suggesting ACE2 Ig-TD is a good candidate for developing as a super neutralizer of SARS-CoV-2. See FIG. 47.

[2396] As shown in the previous FIG. 47, ACE2 Ig-TD can bind spike trimer with higher binding affinity than the RBD monomer. The captured recombinant spike proteins were used here to capture seroconverted human antibodies in serum (i.e. The fluid and solute component of blood, which does not play a role in clotting, as the skilled addressee knows). The ACE2 Ig-TD captured trimer can detect seroconverted SARS-CoV-2 antibodies in serum with higher sensitivity than ACE2 Ig-TD captured RBD domain monomer (FIG. 48). It is therefore anticipated that ACE2 Ig-TD can not only be used as a decoy to potently neutralize SARS-CoV-2 for therapeutic or prophylactic medical use, but it can alternatively be used in sensitive serological assays for detecting SARS-CoV-2 specific seroconverted antibodies. Positive detection could be made in the range from 1000 to 10000-fold dilution, thereby showing the very high sensitivity of an ELISA assay using a multimer of the invention.

### Example 28: Analysis of CR3022 and ACE2 Based Quads for Enhanced Binding and Neutralization Potency

### Methods

### Expression Vectors and Plasmid DNA Preparation

[2397] All DNA fragments were synthesized by Twist Bioscience (California) and cloned into the expression vector. Lyophilised plasmid DNA synthesized by Twist Bioscience, were resuspended with MQ water to a concentration of 50 ng/µl. Competent E. coli DH5α cells were transformed with 50 ng of DNA using a conventional heat shock method. Transformed cells were plated on LB agar plates containing 100 µg/mL ampicillin and grown overnight at 37° C. Individual colonies were picked and grown in LB broth overnight at 37° C., 220 rpm. Plasmid DNA were purified from the cells using Qiagen plasmid extraction kits, according to the manufacturers instructions (Qiagen).

### Expression of Quad Proteins in Expi293F Cells

[2398] Expi293F™ cells (Thermo Fisher Scientific) were cultured in Expi293™ Expression Medium (Thermo Fisher Scientific) according to the manufacturer’s recommendations. The only exception was that 5% CO₂ was added directly to the flasks when the cells were split and non-vented caps were used.

[2399] Two methods involving different transfection reagents were utilised for protein expression. The methods for 30 ml cultures are described below and the protocol was adapted to either scale up or down according to the experimental requirements.

[2400] For PEI transfections the cells were counted one day prior to transfection using a NC-3000™ (ChemoMetec) and were diluted to 1.5 × 10⁶ cells/ml using Expi293™ Expression Medium. The cells were cultured in 5% CO₂ at 37° C., 125 rpm overnight. The following day the cells were counted, spun down for 5 minutes at 1000 rpm and resuspended at 2 × 10⁶ cells/ml in 30 ml of fresh media. 33 ug of plasmid DNA was added to 900 ul media and 90 ul of PEI Max (Polysciences Inc.) was added to 900 ul media. The DNA and transfection reagent samples were mixed and incubated at room temperature for 15 minutes. The DNA/transfection reagent mixture was added to the cells, which were cultured as before and incubated for a further 72 hrs.

[2401] For transfections with Expifectamine™ 293 Reagent (Thermo Fisher Scientific) the cells were also diluted to 1.5 × 10⁶ cells/ml in Expi293™ Expression Medium one day prior to transfection. On the day of transfection the cells were centrifuged and resuspended at 2.5 × 10⁶ cells/ml in 30 ml of fresh media. Two tubes containing 1.5 ml of Gibco™ Opti-MEM™ (Thermo Fisher Scientific) were prepared. 30 ug of plasmid DNA was added to one tube and 80 ul of Expifectamine was added to the other. The solutions were mixed and incubated at room temperature for 30 minutes. The DNA-transfection reagent complex was added to the cells, which were cultured in 5% CO₂ at 37° C., 125 rpm. Following 16-18 hrs incubation, transfection enhancers 1 and 2 were added to the cells according to the manufacturers protocol. The cells were incubated for a further 96 hours.

### Purification of His-Tagged Proteins

[2402] The cells were harvested by centrifugation for 10 minutes at 4000 rpm. The ~30 ml supernatant was filtered through a 0.22 µm filter and diluted to 50 ml with binding buffer (50 mM HEPES, pH 7,4, 250 mM NaCl, 20 mM imidazole) containing Complete™ EDTA-free protease inhibitors (Roche) to facilitate binding to the column. A 1 ml HisTrap™ HP column (GE Healthcare) was connected to an AKTA Start (GE Healthcare) and pre-equilibrated with binding buffer. The protein-containing media was loaded onto the column using a flow rate of 1 ml/min. The column was washed with >10 CV of binding buffer before the protein was eluted using a 20-300 mM imidazole gradient over 12 ml. 0.5 ml fractions were collected and analysed by SDS-PAGE. Protein containing fractions were pooled and concentrated using Amicon® Ultra centrifugal filter units (Millipore).

### Sds-Page

[2403] Purified proteins were analysed by separating out on SDS-PAGE under denaturing condition. Typically, 1-2 µg of purified protein were loaded per lane on SDS-PAGE gel. The gels were run in Tris-Glycine buffer containing 0.1% SDS. A constant voltage of 150 volts was used and the gels were run for ~70 mins until the dye front has migrated fully.

[2404] SDS-PAGE (15% Bis-Tris) gels were prepared using the following resolving and stacking gels.

[2405] Resolving Gel:
[2406] 5 ml 30% Bis-Acrylamide
[2407] 2.6 ml 1.5 M Tris (pH 8.8)
[2408] 50 µl 20% SDS
[2409] 100 µl 10% APS
[2410] 10 µl TEMED
[2411] 2.2 ml MQ Water

[2412] Stacking Gel:
[2413] 0.75 ml 30% Bis-Acrylamide
[2414] 1.25 ml 1.5 M Tris (pH 8.8)
[2415] 25 µl 20% SDS
[2416] 50 µl 10% APS
[2417] 5 µl TEMED
[2418] 2.9 ml MQ Water

### General Binding ELISA Assay

[2419] The potential of the purified Quad proteins to bind its target protein was confirmed by indirect binding ELISA. Briefly, high binding 96 well plates (Corning) were used for coating recombinant target protein (1-2.5 ug/ml diluted in PBS or as indicated), which were typically stored at 4° C. overnight. Plates are then washed 3 times with 200 ul wash buffer (PBS + 0.1% Tween) and blocked using 200 ul blocking buffer (PBS + 1% BSA) for 1 hour at room temperature. Purified protein samples are typically serially diluted in dilution buffer (PBS + 0.1% BSA) and 100ul/well is added. Samples are incubated at room temperature for 1 hour after which the plate is washed again 3 times using 200 ul wash buffer. Detection antibodies as indicated in the text was diluted according to the manufacturer recommendation is added and incubated at room temperature for 1 hour. The plate is washed for the final time using 3x 200 ul wash buffer and 50 ul pre-warmed detection reagent (TMB - Sigma) is added per well and the plate incubated in the dark for 10-30 mins. The reaction is stopped by adding 25 ul/well of 1 M sulfuric acid. The absorbance at 450 nm was read using a CLARIOstar microplate reader (BMG Labtech). For competitive ELISA, a fixed amount of biotinylated spike protein or CoV-2 RBD protein (0.5 nM - 7.5 nM or as indicated) is mixed with the purified protein samples and pre-incubated at room temperature for 30 minutes prior to adding to protein coated ELISA plates. Europium labeled streptavidin is used as a detection reagent (Perkin Elmer).

### Analysis of Enhanced Binding and Neutralization Potency

[2420] CR3022 is an antibody to SARS-CoV-1. It binds the receptor-binding domain (RBD) of CoV-1 more strongly than SARS-CoV-2 receptor binding domain (RBD). To enhance the CR3022 cross-reactive binding strength to CoV-2 RBD, the variable regions of CR3022 were used to generate different Fab Quad formats either with or without Fc region in order to increase the Fab binding domain valency from bivalent to tetravalent schematically shown in FIGS. 56A-C.

[2421] Human ACE2 is a key receptor that SARS-CoV-2 virus uses to gain entry into cells to cause infection. The receptor-binding motif of SARS-CoV-2 is the main attachment point for ACE2. Thus, to generate a decoy ACE2 Quad to neutralize virus binding ACE2 expressed on host cell surface, an ACE2 Fc fusion Quad protein was generated. The extracellular domain of ACE2 was fused to IgG Fc directly at the hinge region, which was then linked to the p53 tetramerization domain as schematically shown in FIG. 56D.

[2422] CR3022, CR3022-based Quads and ACE2 Ig-TD proteins were produced in Expi293 cells as soluble secreted proteins and their binding to CoV-1 and CoV-2 RBD was analysed by indirect ELISA. For CR3022 based Quads, high-binding ELISA plates were coated with either 100 ng of CoV-1 or 100 ng CoV-2 RBD and serially diluted antibody was added from 50 nM. Bound antibody was detected using Pro L HRP. As expected, CR3022 showed stronger binding to CoV-1 RBD than CoV-2 RDB (FIGS. 56E-F). The Quad versions of CR3022 all showed significant increase in binding to CoV-1 RBD and in particular to CoV-2 RBD binding compared to CR3022. Thus, the increased Fab binding domain valency in the Quad formats allowed enhancement in cross-reactive binding to CoV-2 RBD.

[2423] The different CR3022 Quad formats were also tested for their ability to neutralize ACE2: Spike interaction in a competitive ELISA. Recombinant ACE2-IgG (200 ng) was used to coat ELISA plates and then serially diluted antibody starting from 60 nM with a fixed amount of full-length spike trimer (7 nM) was preincubated at room temperature for 30 minutes before adding to each well. Wells with only spike protein added without any inhibiting antibody was used as 100% binding. Europium labelled streptavidin was used to detect the amount of spike protein that was bound to ACE2. CR3022 was unable to neutralize ACE2:spike interaction even at the maximum concentration used in this assay (FIG. 56G). The three different Quad versions of CR3022 were all able to inhibit the interaction between ACE2 and spike protein. The increase in the functional affinity of these Quad formats helped promote not only the cross reactive binding to CoV-2 but it also helped in promoting cross-reactive neutralization.

[2424] Similarly for the ACE2 Ig-TD tetravalent Quad, it was tested for it’s ability to bind both full-length spike protein trimer or CoV-2 RBD by indirect ELISA. ACE2 Ig-TD Quad (100 ng) was used to coat ELISA plates and serially diluted full-length spike protein or CoV-2 RBD from 100 nM was added to the coated ELISA plate. Bound spike protein or CoV-2 RBD to ACE2 was detected using anti-His HRP. ACE2 Ig-TD Quad bound both spike protein and CoV-2 RBD in a dose-dependent manner (FIG. 56H). Stronger binding of ACE2 Ig-TD to the spike trimer can be seen than the CoV-2 RBD domain. This could be due to the spike protein being a trimer whereas the RBD domain is a monomer. Nevertheless, binding of ACE Ig-TD to the spike protein and RBD confirmed ACE2 in this Quad format was fully assembled.

[2425] To examine whether ACE2 Ig-TD Quad was able to neutralize the interaction of either ACE2:CoV-1 RBD or ACE2:CoV-2 RBD, ELISA plates were coated with 200 ng of recombinant ACE2-Ig protein. Serially diluted ACE2 Ig-TD Quad from 100 nM with a fixed amount of CoV-1 or CoV-2 RBD (7 nM) was added to each well. Wells with only CoV-1 or CoV-2 RBD protein added without ACE2 Ig-TD was used as 100% binding. Bound CoV-1 RBD or CoV-2 RBD to ACE2 was detected using anti-His HRP (FIG. 56-I). ACE2 Ig-TD Quad was able to neutralize the interaction of ACE2:CoV-1 RBD and ACE2:CoV-2 RBD interaction in a dose dependent manner confirming ACE2 Ig-TD is fully functional and it has the potential to be used as a decoy molecule to prevent SARS CoV-2 infection.

[2426] To compare the neutralization potency of the CR3022 based Quads and ACE2 Ig-TD, the competition ELISA as described above was set up using 250 ng of recombinant ACE2-Ig protein to coat the ELISA plate and 7.5 nM fixed amount of CoV-2 RBD together with serially diluted CoV-2 inhibitor protein from 30 nM was added to each well. Wells with only CoV-2 RBD protein added without any inhibitor antibody was used as 100% binding. Europium labelled streptavidin was used to detect the amount of CoV-2 RBD protein that was bound to ACE2 (FIG. 56-J). The data confirmed the CR3022 based Quads and the ACE2 Ig-TD were all able to inhibit ACE2:CoV2 RBD interaction in a dose dependent manner. The ACE2 Ig-TD was able to completely block ACE2:CoV2 RBD interaction at the higher doses (>3 nM) whereas both the CR3022 Quads tested in this assay were only able to inhibit approximately 70% of the ACE2:CoV2 RBD interaction. The IC₅₀ values are summarized in Table 7.

### Example 29: Engineering SARS CoV-2 Neutralizing VHH Nanobody Into Quad Formats With Increasing Valency and Potency

[2427] To extend the utility, SARS CoV-2 cross-reactive nanobody termed ‘GB’ (or ‘QB-GB’) was used to format different versions of Quads with varying valency, size and structure and either with or without an Fc region. The valency of the different formats varied from monovalent to octavalent as shown schematically in FIGS. 57A-I. Expression of GB based Quads were carried out in Expi293 cells and the resulting proteins were analysed on reduced SDS-PAGE gel after affinity purification (FIG. 57J). Protein polypeptides from all the expressed proteins migrated according to their expected molecular weight confirming correct expression and high purity.

[2428] Next the GB Quad proteins were analysed for their ability to bind CoV-2 RBD in an indirect ELISA binding assay. ELISA plates were coated with 200 ng CoV-2 RBD protein and serially diluted GB Quad proteins from 100 nM was added to the wells. Binding of GB Quad proteins to CoV-2 RBD was detected using anti-FLAG HRP. With the exception of GB VHH (monovalent), which only showed very weak binding at the highest concentration (100 nM), all other GB-based Quad proteins showed a dose dependent binding to CoV-2 RBD (FIG. 57K). It is noteworthy, in this binding assay, due to high avidity of these molecules and the limitations in the assay window; the difference in binding strengths between the molecules could not be differentiated.

[2429] To tease out the difference in binding strength and to demonstrate the difference in the neutralization potencies between the different GB Quad molecules, a competitive ELISA was performed. ELISA plates were coated with 250 ng of recombinant ACE2 Ig fusion protein and serially diluted GB proteins from 15 nM with a fixed amount of CoV-2 RBD (2 nM) was added to the coated ELISA plate. Wells with only CoV-2 RBD protein added without GB protein was used as 100% binding. Europium labelled streptavidin was used to detect the amount of CoV-2 RBD protein that was bound to ACE2. The data were plotted as percentage inhibition of ACE2:CoV-RBD interaction in three groups (FIGS. 57L-N). GB VHH (Q176) and the non-Quad based GB formats (Q178 and Q180) were used in each plot as reference for comparison. In general, it can be seen the neutralization potential of GB proteins were significantly increased with increasing GB binding domain valency of Quad formats with the most potent being Q186, which is a -octavalent GB Quad with an IC₅₀ value of 14.8 pM.

[2430] As part of this experiment, two additional nanobodies termed ‘BG’ and ‘FE’ (also known as ‘QB-BD’ and ‘QB-FE’ respectively) were selected for testing as Quad formats to bind and neutralize SARS-CoV-2. Nanobody BG and FE were produced as monovalent VHH and also reformatted into octavalent monomeric Ig-TD format as schematically represented in FIG. 57-O and Q. Combinatorially, they were tested for their ability to bind SARS CoV-2 RBD in an indirect binding ELISA and also for their ability to neutralize the interaction of ACE2:CoV-2 RBD in a competitive ELISA (FIGS. 57R-S). BG and FE VHH nanobodies were unable to bind RBD even at the highest concentration (100 nM) as a monovalent nonobody. The octavalent Quad formats of these two nanobodies bound CoV-2 RBD very well in a dose dependent manner and BG and FE appear to bind CoV-2 RBD in a similar manner.

[2431] A competitive ELISA was performed only with the monomeric Ig-TD formats for BG and FE as described above and the non-Quad formats of GB VHH were included for comparison (FIG. 57S). Both Quad version of the nanobodies were able to inhibit ACE2:CoV-2 interaction but only BG mIg-TD Quad was able to inhibit the interaction completely. FE mIg-TD appeared to inhibit a maximum of 70% of the ACE2: CoV-2 interaction similar to that observed with CR3022 based Quads outlined in Example 28.

[2432] All the IC₅₀ values from the competitive ELISA are summarized in Table 8.

[2433] The exemplification of nanobody based Quad reformatting into multiple different formats highlighted the power of increasing binding domain valency has on the neutralization potency. In the competitive ELISA described above, the limited assay window together with the detection limitations prevented accurate measurements of some the most potent Quads such as the octavalent Quads causing rapid signal saturation. As a means to improve the assay signal and tease out the enhanced potency of two of the most potent GB-based Quads further, a competitive sandwich ELISA was performed with substantially reduced amounts of CoV-2 RBD similar to that reported by Hansen et al. In their sandwich ELISA a capture antibody was used to capture his-tagged ACE2 protein followed by the addition of a reduced amount of CoV-2 RBD (10-15 pM) plus serially diluted CoV-2 inhibitor antibody. To replicate a similar assay, ELISA plates were coated with 100 ng anti-human IgG to capture 200 ng of recombinant ACE2 IgG. Then to each well a fixed amount of CoV-2 RBD (0.5 nM) together with serially diluted CoV-2 inhibitor antibody (Q185 or Q186/Q182) was added. Europium labelled streptavidin was used to detect the amount of CoV-2 RBD protein that was bound to ACE2. In this assay set-up, the assay window was improved and the IC₅₀ value for Q185 and Q186/Q182 (FIG. 58) when compared to the lead SARS-CoV-2 antibody molecules reported by Hansen et al., indirectly confirm that both Q185 and Q186/Q182 Quads are significantly more potent than these SARS-CoV-2 neutralizing antibodies currently under clinical investigation.

### Example 30: Engineering of Multivalent SARS CoV-2 Neutralizing VHH Nanobody Linked in Tandem Into Different Quad Formats With Increasing Valency and Potency

[2434] In example 29, SARS CoV-2 cross-reactive nanobody ‘GB’ was formatted into different multivalent formats with varying size, shape and valency. In this example, the same SARS CoV-2 cross-reactive ‘GB’ nanobody was used to generate multivalent Quads where the VHH was linked in tandem via a flexible peptide linker as shown schematically in FIG. 59-A(Q 177B). In a similar strategy, a bispecific VHH Quad version was also generated by linking in tandem SARS-CoV-2 VHH ‘GB’ with a VHH with cross-reactivity to MERS-CoV RBD termed ‘EE’. The bispecific VHH tandem Quad is shown schematically in FIG. 59-B(Q177C). In both of these examples, the tandem VHH is linked directly to the TD via a linker, which is rapidly assembled to form tetramers with valences of 8 for the monospecific Quad and 4 + 4 for the bispecific Quad format.

[2435] Additional tandem VHH Quad formats were generated either as monospecific containing only ‘GB’ linked in tandem (FIG. 59-C(Q179B) and 59-E (Q185B)) or as bispecific VHH formats containing ‘GB’ and ‘EE’ VHHs linked in tandem (FIG. 59-D(Q179C) and 59-F (Q185C)). In both of these examples, the Ig core hinge region was kept intact allowing the formation of a homodimer intermediate. This homodimer intermediate is then rapidly dimerized to form a dimer of a dimer (tetramer) facilitated through tetramerization of the TD.

[2436] The tandem VHH Quad formats generated in this example were expressed in Expi293F cells and the resulting proteins were affinity purified directly from the culture supernatant as described in example 29. The purified proteins were analysed by SAS-PAGE as denatured non-reduced protein and reduced protein (FIG. 59-G). The proteins separated out on SAS-PAGE as non-reduced protein confirmed these Quads were highly pure with purity >95%. Further, the molecular weights of the different tandem Quad formats were also confirmed as the protein all separated out in SDS-PAGE according to their expected molecular weight. The reduction of the cysteine bonds present in the core hinge region of Quad formats Q179B, Q179C, Q185B and Q185C can be seen in the reduced SDS-PAGE where the molecule weigh of these Quads are reduced down from the dimeric intermediate state to the monomeric state.

[2437] To further analyse these tandem VHH Quad formats, their enhanced potential to neutralize the interaction of SARS-CoV-2 spike protein with the ACE2 receptor, a competitive ELISA assay was performed as detailed in example 29 with the following conditions. High binding ELISA plates were coated with 100 ng of anti-human Ig, which was used to capture 100 ng of ACE2-Fc. A fixed amount of SARS-CoV-2 RBD biotinylated protein at 15 pM was pre-mixed for 30 mins with serially diluted 1 in 3 folds of anti-SARS-CoV-2 tandem VHH Quads from 30 nM before adding to the ELISA plate with the captured ACE2-Fc. Any SARS-CoV-2 RBD not competed by the Quad molecules were detected using anti-Strep-HRP detection antibody. The signal obtained from the wells with only RBD added without any competitor was used to determined 100% binding and wells with no added RBD or competitor molecule was used to determine zero binding. From this, the percentage inhibition of SARS-CoV-2 RBD interaction with ACE2 at different competitor concentration was plotted (FIG. 59-H) and their potency was determined as summarized in FIG. 59-I. As a reference comparator, three clinical stage SARS-CoV-2 antibodies with potential to compete the interaction of SARS-CoV-2 spike with ACE2 receptor (Hansen et al., 2020; Shi et al., 2020) were also included in this assay to determine the relative potency enhancement of the VHH tandem Quads.

[2438] All of the tandem VHH Quads were found to be significantly more potent at neutralizing SARS-CoV-2 RBD interaction with ACE2 than the three clinical stage anti-SARS-CoV-2 antibodies. The most potent of the tandem VHH Quad (Q185B) with IC₅₀ value of 0.03 pM was found to be between 23,000 - 63,000 times more potent than the three clinical stage antibodies in this competitive ELISA assay setting. The massive improvement in neutralization potency using tandem VHH to generate Quads clearly confirms the multivalent strategy is a good approach for improving antibody functionality. This opens up the scope to further developing Quad formats with even higher neutralization potencies.

### Example 31: Further Engineering of Multivalent SARS CoV-2 Neutralizing VHH Nanobody Linked in Tandem Into Different Quad Formats With Increasing Valency and Potency

[2439] To extend the multivalent Quad formats beyond octavalency using tandem VHH, in this example twelve additional Quad formats were generated utilizing either the tandem ‘GB’ VHH or ‘GB’ and ‘EE’ VHH linked in tandem to generate monospecific and bispecific Quad formats respectively. The different Quad formats varied in shape, size and valency as schematically represented in FIGS. 60-A - 60-L. The valency of these multivalent Quad formats ranged from 12 -24 for the monospecific Quads (Q203/Q205, Q177D, Q177E, Q185D, Q185E, Q209/Q182, Q209/Q205, Q210/Q205 & Q212/Q205) and 16 in an 8 + 8 configuration for the bispecific Quad formats (Q204/Q206, Q211/Q206 and Q213/Q206).

[2440] The multivalent tandem VHH Quads were expressed in Expi293T cells as described in example 29. Surprisingly and like all of the previously described Quads formats, these tandem VHH formats all expressed well with high purity as soluble secreted protein with average protein titres >150 mg/L. Following affinity purification with Ni-NTA, the proteins were analyzed by SDS-PAGE with either non-reduced or reduced protein. All of the Quad proteins separated out on the non-reduced SDS-PAGE (FIG. 60-M) according to their expected molecular weight corresponding to the monomeric form or according to their dimeric form where Quad formats are dimerized through the hinge region such as Q177E. The SDS-PAGE separating the reduced protein samples (FIG. 60-N) nicely highlights the reduction in disulphide bonds in Quad formats containing two chains such as Q211/Q205 where the two chains are held together via disulphide bonds. Protein reduction can also be seen as expected in Quad formats with an intact hinge region containing disulphide bonds such as Q185E. By demonstrating protein reduction either by separating the two chains or by reducing a dimer into a monomer in Quad formats containing core hinge region confirms these Quad formats are assembled correctly.

[2441] Given the further increase in binding domain valency in the Quad formats in this example compared to those in example 30, the expectation is that the neutralization potency would also be further improve. To demonstrate the potency enhancement, competitive ELISA was performed using a selection of Quad proteins with increased stringent condition. The competitive ELISA was performed similarly to that described in example 30 with the exception that 2 nM fixed amount of biotinylated SARS-CoV-2 RBD was used instead of 15 pM. The most potent Quad molecule described in example 30 (Q185B) along with the clinical stage mAb ‘REGN10987’ was also run alongside these Quads for comparison (FIG. 60-O). From the initial observation, it is noteworthy the clinical stage mAb ‘REGN10987’ at these stringent assay conditions does not appear to be very potent compared to the multivalent Quad formats. For example at 1 nM concentration of anti-SARS-CoV-2, REGN10987 has almost zero neutralization potential whereas all of the Quad formats at 1 nM concentration can almost completely neutralize SARS-CoV-2 RBD interaction with ACE2.

[2442] Furthermore and as expected, all of the new Quads tested in this example (Q203/Q205, Q177D, Q185D, Q185E, Q209/Q182 and Q209/Q205) showed improved neutralization potency compared to Q185B, which was found to be the most potent Quad in example 30. However, the extent of the improvement in potency between the new Quad formats highlighted in this example and Q185B was not observed as substantial given the binding domain valency difference between for example Q209/Q208 and Q185B being 24 and 8, respectively. The most likely explanation for this is probably due to the limited assay sensitivity and therefore any significantly gain in potency could not be differentiated due to the rapid saturation of the assay signal. To determine the true potency of these multivalent Quad formats, which are expected to be ultra-potent would warrant further investigation of these Quads in an in vivo setting where a measure of a biological effect rather than a assay signal would be measured and thus making it possible to differentiate and observe their true potency enhancement.

### Example 32: Improving SARS-CoV-2 Neutralization Potency of Clinical Stage mAbs by Reformatting Them Into Multivalent Quad Formats

[2443] The first-in-class clinical stage anti-SARS-CoV-2 mAbs REGN10987, REGN10933 (Hansen et al., 2020) and CB6 (Shi et al., 2020) are currently being trialed for their efficacy in reducing viral load and viral infections in COVID-19 patients. Given the results highlighted in the above examples whereby increasing the binding domain valency, a consistent improvement in neutralization potency could be observed in the in vitro neutralization assays. Further as shown in example 31, REGN10987 could not neutralize SARS-CoV-2 RBD binding to ACE2 using the stringent assay conditions compared to the multivalent Quads. In this example, the binding domains of REGN10987, REGN10933 and CB6 were used to reformat them into three different multivalent Quad formats to show 1) How the different formats can neutralize the SARS-CoV-2 binding to ACE2 and 2) Whether the different formats effect the neutralization potential due to their size and structural configuration.

[2444] In the first format termed Ig-TD, the p53 tetramerization domain was directly linked to the C-terminus of the mAb with the CH3 domain as schematically shown in FIG. 61-A. In the second format termed Fab-TD, the TD was directly linked to the upper hinge region but lacked the core hinge. In this example, the upper hinge region was directly linked to TD as shown schematically in FIG. 61-B. The third format is similar to the Ig-TD format except the core hinge region only was removed where the upper and lower hinge region was kept intact to give a monomeric Ig-TD format as shown schematically in FIG. 61-C. In all three examples, the TD facilitated the assembly of a tetramer and thus transforming the bivalent mAbs into tetravalent mAbs.

[2445] The three different Quad formats of REGN10987, REGN10933 and CB6 were expressed in Expi293T cells. Like normal IgG antibodies, the Quad formats of these mAbs also expressed as soluble secreted proteins where the assembled tetrameric Quad proteins were harvested from the culture supernatant and affinity purified. The purified proteins were separated out on SDS-PAGE gels using either non-reduced or reduced proteins (FIGS. 61-D - 61-F). From the non-reduced SDS-PAGE, the Quad proteins appear to be highly pure (>95%) and in the reduced SDS-PAGE, reduction of the two chains can be seen, which confirms these Quad proteins were correctly assembled.

[2446] To check for improved neutralization potency of the Quad formats over the parental IgG format, competitive ELISA was performed as described in example 29 with some changes in the assay conditions. Instead of SARS-CoV-2 RBD, biotinylated SARS-CoV-2 Spike trimer was used at a fixed concentration of 75 pM. For each of the clinical stage mAb, the three different Quad formats were compared for their neutralization potential compared to the parental IgG mAb and against Q185B as highlighted in FIGS. 61-G - 61-I. From the initial observation, it can be seen that all of the Quad formats had improved neutralization potency of SARS-CoV-2 spike interaction with ACE2 compared to the parental mAb but not as potent as the tandem VHH Quad, Q185B. Secondly, it can be seen the Ig-TD and mIg-TD Quad formats only had moderate enhancement in neutralization potency whereas the Fab-TD format consistently showed superiority for all three clinical stage mAbs in terms of improving the neutralization potency compared to the parental mAb as summarized in FIG. 61-J. For example, REGN10987 Fab-TD format had a 600-fold improvement in neutralization potency over the parental mAb. From these data in this artificial in vitro neutralization assay setting, it can be seen that the size, shape and even the flexibility of the molecule could enhance the neutralization potential of inhibiting SARS-CoV-2 Spike protein binding to ACE2. The superior neutralization potency enhancement of Fab-TD format is something worth analyzing generally for antibodies, such as further to improve other SARS-CoV-2 antibodies binding alternative epitopes within the spike protein with improved binding such as antibodies targeting the S2 ectodomain.

### Example 33: Design, Expression and Analysis of Multivalent VHH Nanobody Formats Based on Sequence Nb-112

[2447] As described in previous examples, VHH nanobodies can be rapidly designed into different multivalent formats starting from simple monomeric building blocks. The VHH sequence Nb-112 against SARS-CoV-2 spike protein described previously (Esparza et al., 2020) was used to design different multivalent formats with varying size, shape, flexibility and valency. FIGS. 62A & 62B depicts two such examples that were produced in this example where VHH Nb-112 was reformatted to yield tetravalent and octavalent Quad molecules. Nb-112 sequence could also be easily reformatted into any of the Quad formats described in the previous examples and as schematically shown in FIGS. 55-60. Optional Linkers 1 and 2 (GGGGSGGGGS and GGSGGS respectively) shown in FIG. 62B were included in the octamer we constructed. We included GGGGSGGGGS Linker 1 in the tetramer we constructed (FIG. 62A). It is possible in alternatives to omit linkers, or to use one linker (linker 1 or 2) in the octamer polypeptide.

[2448] One of the advantages of these multivalent Quads, apart from them being highly soluble, stable and amenable to large-scale production, is that they are relatively small in size, particularly the tetravalent versions without Fc compared to standard mAbs. The relative small size would be particularly advantageous when formulating these molecules for delivery through inhalation. Owing to their high stability properties, Quad based nanobodies is likely to maintain the structural integrity and thus the functional properties to neutralize SARS-CoV-2 after nebulization. Further, given the size of these Quads being above the renal clearance threshold, Quads delivered through inhalation is likely to persist for a longer period and provide a molecule with significantly enhancement efficacy than the native VHH Nb-112 nanobody.

[2449] The tetravalent (also called Q232) and octavalent (also called Q233) versions of Nb-112 were produced as schematically represented in FIGS. 62A and B for which the polypeptide sequences are shown in Table 24. The monovalent Nb-112 nanobody (also called Q231 was also produced for comparison. Expression vectors for producing Q231-Q233 where transfected into Expi293F cells and the proteins were produced as described in Example 28. Since the VH of Nb-112 nanobody is a VH3 subfamily member known to have intrinsic affinity for Protein A (Seldon et al., 2011), the harvested protein from culture supernatant were purified using MabSelect Sure (Sigma). The purified Q231-Q233 proteins were analysed on denaturing SDS-PAGE (FIG. 62C-1). Protein polypeptides from all three proteins (Q231-Q233) migrated according to their expected molecular weight confirming correct expression and high purity. The protein yields after Protein A affinity purification was measured using Nanospec and it could be seen the tetravalent (Q232) and octavalent (Q233) versions of Nb-112 yielded excellent protein yields equivalent to 338 mg/L and 288 mg/L respectively (FIG. 62C-2). The monovalent version (Q231) on the other hand being the smallest of the molecule surprisingly yielded very poor protein yield equivalent to only 19 mg/L. To investigate whether this poor protein yield was due to poor expression or inadequate purification method and since a 6xhistidine tag was included onto the C-terminus, Q231 was purified using Ni-NTA column as described in Example 28. After measuring the protein yield using nanospec, the protein yields was found to be good and equivalent to 187 mg/L. This confirmed the expression of the monovalent Nb-112 (Q231) was fine and purification using Protein A resin through the monovalent interaction was not sufficient to efficiently purify this protein whereas surprisingly and advantageously the tetravalent and ocatvalent versions with enhanced binding to Protein A resin through multiple VH domain interaction with the resin allowed these multivalent proteins to be purified efficiently similar to a mAb containing an Fc region.

[2450] To investigate the functionality of the multivalent Nb-112 Quad proteins, competitive ELISA was performed for their ability to neutralize the interaction of SARS-CoV-2 spike RBD with the ACE2 receptor. The monovalent Nb-112 was reported to be a potent neutralizer of spike RBD interaction with ACE2 (Esparza et al., 2020). Therefore, two different amounts of spike RBD were used in competition ELISA. Briefly, high binding ELISA plates were coated with 100 ng/well of anti-human IgG and incubated at 4° C. overnight. After blocking with 1% BSA for 1 hour at room temperature, 100 ng/well ACE2-Fc was added and the plate incubated for a further 1 hour. The plates were washed 3 times with sample buffer (PBS containing 0.1% Tween) and 100 ul/well serially diluted anti-SARS-CoV-2 molecules (Q231-Q233 and REGN10933 as positive control) starting from 30 nM premixed at room temperature for 30 minutes with a fixed about of biotinylated SARS-CoV-2 RBD either at 2 nM (FIG. 62D) or 150 pM (FIG. 62E) was added to the coated plate. Wells with only sample buffer or only spike RBD protein added without any antibody was used to determine percentage neutralization. After incubating the plate for one 1 hour, the plates were washed again 3 times and a detection protein (Strep-HRP) was added to detect non-competed spike RBD that bound the captured ACE2 protein. After the final wash as above, the signal was generated with the addition of 100 ul TMB and the reaction was stopped with the addition of 50 ul 1 M sulfuric acid. The absorbance at 450 nm was read using a microplate reader. The data was plotted as percentage neutralization over a range of anti-SARS-CoV-2 inhibitor concentration.

[2451] From the data, a nice dose-dependent inhibition of SARS-CoV-2 interaction with ACE2 can be seen in the competitive ELISA at both the high (2 nM -FIG. 62D) and low (150 pM -FIG. 62E) amounts of SARS-CoV-2 RBD used, confirming the produced multivalent Nb-112 molecules are functional. Furthermore, an increase in potency with increase binding domain valency of the Nb-112 molecules can be seen from the IC₅₀ values. It is noteworthy, given Nb-112 is already highly potent and even more so than the clinical stage mAb (REGN10933) and given the ELISA has a limited assay window, it would not be possible to determine the true levels of potency enhancement of the multivalent Quads over the monovalent Nb-112 nanobody using this in vitro ELISA assay (it likely is even greater than measured). Nevertheless, a good correlation with increase binding domain valency with increase neutralization potency can be seen when comparing the potency between the tetravalent and octavalent versions of Nb-112 with the monovalent version. To determine the true potency enhancement of these multivalent Quads would require further characterizing in in vivo animal infection models. We expect them to be highly potent in aminals and man.

### Example 34: Design, Expression and Analysis of Multivalent VHH Nanobody Formats Based on Sequence Nb-112 With Intact Hinge Region

[2452] Following on from Example 33 where tetravalent and octavalent versions of Nb-112 were generated, in this example a modified tetravalent and octavalent version of Nb-112 were designed and produced where an intact hinge region was included in the construct. The hinge region allows for the dimerization of the monomeric building blocks to form dimers upon which these dimers are further dimerized in an anti-parallel manner through the p53 tetramerization domain to form tetramers. A schematic structural arrangement of these new tetravalent (also called Q246 or Nb-112-S-S-TD) and octavalent (also called Q247 or [Nb-112]₂-S-S-TD) Quads can be seen in FIGS. 63A and B respectively and their polypeptide sequences are shown in Table 34. The presence of the disulfide bonds could provide enhanced stability and functional neutralization potency to these multivalent Quads formats and this would be advantageous particularly when formulating these nanobody Quads through nebulisation.

[2453] Expression vectors for producing Q246 and Q247 were transfected into Expi293F cells and the proteins were produced as described in Example 28. As with Q232 and Q233 described in Example 33, the intrinsic binding properties of the VH3 subfamily for Protein A resin was exploited to purify both Q246 and Q247. The protein yields after Protein A affinity purification was measured using Nanospec and it can be seen the tetravalent (Q246) and octavalent (Q247) versions of Nb-112 yielded excellent protein titers equivalent to 350 mg/L and 265 mg/L respectively. The protein yields were similar to the tetravalent and octavalent versions described in Example 33 indicating that the present of the hinge region did not hamper protein production. To analyse the produced protein, a small aliquot (2 ug/well) were separated out on denaturing SDS-PAGE under non-reduced conditions alongside Nb-112 proteins produced in Example 33. For Q246 and Q247, the protein was also separated out under reduced conditions to visualize the monomeric building block polypeptide (FIG. 63C). Protein polypeptides for Q246 and Q247 migrated according to their expected molecular weight under both non-reduced and reduced conditions.

[2454] To investigate the functionality of the two new tetravalent and octavalent Nb-112 Quads (Q246 and Q247), a competitive ELISA was performed for their ability to neutralize the interaction of SARS-CoV-2 spike RBD with the ACE2 receptor as described in Example 33 using the same conditions. As a comparison, Q231-Q233 was also tested alongside Q246 and Q247 including the benchmark anti-SARS-CoV-2 antibody REGN10933. The data was plotted as percentage neutralization over a range of anti-SARS-CoV-2 inhibitor concentration (FIG. 63D-1).

[2455] From the in vitro neutralization assay data, a nice dose-dependent inhibition of SARS-CoV-2 interaction with ACE2 can be seen where the new tetravalent and octavalent versions (Q246 and Q247 respectively) were found to be significantly more potent than the monovalent Nb-112 VHH as seen from the IC₅₀ values (FIG. 63D-2). Interesting in this assay setting, the tetravalent versions (Q232 and Q246) had similar neutralization potencies to each other despite their differences in their structure. This was also true for the octavalent versions (Q233 and Q247).

[2456] For the reasons discussed in Example 33 in terms of the high affinity of Nb-112 VHH and the limited assay window, the real differences in neutralization potences might not be possible to be differentiated in this in vitro artificial assay setting. A cell-based assay such as a pseudovirus neutralization assay or even better an in vivo animal model would be required to fully characterize and tease out potency differences between these multivalent Quad formats. However, on the whole a good correlation with increase binding domain valency with increase neutralization potency can be seen when comparing the neutralization potences between the tetravalent and octavalent versions of Nb-112 to the monovalent version confirming that these new multivalent formats are functionally active and are capable of neutralizing SARS-CoV-2 through blocking its interaction with ACE2 receptor.

### Example 35: Production & Characterisation of Nebulised Quads

[2457] Importantly, these Quad therapeutics may be delivered via inhalation to a human or animal subject. Inhalation has major advantages over other routes of administration and could be one of the most important potential uses for a therapeutic for SARS-CoV-2. For example, nebulisation may be performed using a commercially available human-use Aeroneb Solo™ system (https://www.aerogen.com/aerogen-solo-3/), interfaced with a nose mask. The Aeroneb Solo nebuliser can, thus, be used to produce ~ 3 micron particles of Quads for lung delivery. This is suitable for deep lung delivery.

[2458] In an experiment, we will test once daily administration to lambs of a nebulised Quad. We expect that this will result in concentrations of the Quad in lung epithelial lining fluid that are at least 10 times higher than the in vitro EC₅₀ of the Quad for the cognate virus (eg, SARS-CoV-2). We will assess whether there is any detectable infectious virus in lung epithelial lining fluid, with no or low detectable virus supporting that the proposed route of administration could reduce infectivity. After administration of nebulised Quad, we expect blood concentrations will be lower (eg, 1000 fold lower or less) than lung epithelial lining fluid concentrations, which is important because low blood concentrations likely reduce systemic toxicity and risk of host antibody formation. Alternative routes of administration of Quads include intravenous, intramuscular or subcutaneous administration

[2459] Using the commercially available Aerogen Solo™ vibrating mesh nebuliser, we will nebulise Pichia pastoris-expressed Quad into an in line custom bead condenser. Analysis by size-exclusion chromatography on a Superdex™ 75 column will be carried out to establish no evidence of degradation or aggregation relative to the pre-nebulisation sample. From this, one can conclude that the Quad is resilient to degradation or aggregation during nebulisation.

[2460] Fourt different Quads (FIGS. 62 & 63) as follows will be tested
[2461] Quad 1- a multimer that comprises 4 copies of a polypeptide that comprises the amino acid sequence of SEQ ID NOs: 289;
[2462] Quad 2- a multimer that comprises 4 copies of a polypeptide that comprises the amino acid sequence of SEQ ID NOs: 290;
[2463] Quad 3- a multimer that comprises 4 copies of a polypeptide that comprises the amino acid sequence of SEQ ID NOs: 291; and
[2464] Quad 4- a multimer that comprises 4 copies of a polypeptide that comprises the amino acid sequence of SEQ ID NOs: 292.

### Nebulisation Stability Assessment of Quads

[2465] Stability following nebulisation of Pichia pastoris expressed Quad (eg, a Quad comprising copies of NIH-CoVnb-112) will be performed using an Aerogen Solo High-Performance Vibrating Mesh™ nebuliser placed in line with a custom glass bead condenser. A plastic culture tube will be fitted with a glass-pore frit and filled with sterilized 5 mm borosilicate glass beads. A three-way stopcock will be positioned distal to the frit to prevent pressurization during nebulisation. A 2 mg/mL SEC polished Quad solution will be prepared in 0.9% normal saline to model potential patient delivery. The Quad will be nebulised and the resulting condensate incubated at 37° C. for 24 hr to mimic exposure to body temperature. The nebulised, 37° C. treated Quad will be then collected for stability assessments and protein concentration measurements by BCA assay. Equal masses of pre and post-nebulisation samples will be denatured in LDS sample buffer (Invitrogen) and run on a NuPAGE 12% Bis-Tris precast polyacrylamide gel with SeeBlue Plue 2™ protein standards. Additional pre-and post-nebulisation samples will be injected onto a Superdex 75 Increase 10/300 GL size exclusion column operating on an AKTA Pure 25 M™ system.#

### Stability of Quads in Human Plasma

[2466] To further assess the stability of the Quad (eg, a Quad comprising copies of NIH-CoVnb-112), we will perform incubation of the Quad in pooled normal human plasma and recombinant human albumin followed by affinity measurement to assess preservation of antigen (eg, SARS-CoV-2 RBD) binding potential.

[2467] A Quad (eg, a Quad comprising copies of NIH-CoVnb-112) expressed in Pichiapastoris will be diluted from a concentrated stock solution into apheresis derived pooled human plasma (#IPLA-N, Innovative Research) to a final concentration of 5 µM and incubated at 37° C. for either 24 hr or 48 hr with gentle rotation. An identical sample set will be prepared at 5 µM in a solution containing 35 mg/mL recombinant human albumin (#A9731, Sigma-Aldrich) and incubated at 37° C. for either 24 hr or 48 hr with gentle rotation. A no-incubation control for each the plasma and recombinant human albumin conditions will be prepared at 5 µM. The samples will be prepared in a manner providing all conditions complete at the same time. Quad binding to antigen (eg, SARS-CoV-2 RBD) following treatment in pooled human plasma at time zero, 24 hr, and 48 hr will, we expect, have negligible impact on binding. Similarly, Quad binding to antigen following treatment in recombinant human albumin at all time points will, we expect, have no apparent effect on binding. Such data will support the interpretation that the Quad is satisfactorily stable in the presence of plasma.

[2468] The samples will be diluted 1:10 with IxPBS to yield a final Quad concentration of 500 nM and Bio-layer Interferometry will be performed using immobilized biotinylated antigen (eg, SARS-CoV-2 S protein RBD) to determine retention of binding potential.

### Determining Melting Temperature and Refolding by Circular Dichroism

[2469] Circular Dichroism (CD) will be performed using a Jasco J-815 Spectropolarimeter™. For thermal stability measurements the Quad will be diluted to 10 µg/mL in deionized water and placed in a quartz cuvette with 1 cm path length and CD measured at an ultraviolet wavelength of 205 nm. Quad will be heated from 25° C. to 85° C. at a rate of 2.5° C./min while stirring and then cooled back to 25° C. at the same rate. We expect that measurements using circular dichroism (CD) during heating will reveal that the Quad structure resists unfolding at elevated temperature (eg, until 74° C.) and upon cooling most (eg, at least 50, 60, 70 or 80%) of the structure will return to the baseline CD value. These data will support an extremely stable, robust, high affinity format.

### Exemplary Nebulised Quad Compositions

[2470] Using Aerogen Solo™ with an 8 stage cascade impactor running at a continuous flow rate of 28.3 LPM - see Table 37.

### Example 36: Quad PK and Efficacy Model

[2471] Quads (separately, Quads 1-4) will be produced using a HEK203, CHO or Pichia pastoris X-33 expression system. Formulation buffer will contain NaCl as osmolality agent and phosphate as buffer component.

### Drug Administration

[2472] An Aeroneb Solo™ System (Aerogen Ltd, Galway, Ireland), containing the Aeroneb Solo mesh nebulizer and the Aeroneb Pro-X™ controller will be used in accordance with the instruction manual as provided by the manufacturer. The estimated particle sizes obtained with these meshes will be around 3 to 3.5 µm (MMAD, Median mass aerodynamic diameter). The assembly and operation of the Aeroneb Solo System will be performed according to the nebulizer instruction manual. The nebulizer and the T-piece will be inserted into the breathing circuit. Air will be supplied to the system at an airflow speed of 2 L/min using a compressed air canister that is attached directly to the nebulizer T-piece.

[2473] Testing will be performed in lambs. Prior to dosing, the nebulizer reservoir will be filled with following volumes of different concentrations of the Quad formulation: either 4 mL (3 mg/kg target inhaled dose), 1.3 mL (1 mg/kg target inhaled dose) 0.4 mL (0.3 mg/kg target inhaled dose), 0.2 mL (0.08 mg/kg target inhaled dose) or 0.1 mL (0.04 mg/kg target inhaled dose). A cone mask (Cat # 05305, A.M. Bickford, Inc, US) will be attached to the nebulizer T-piece and placed over each lamb’s nose, mandible and maxilla. The nebulizer will be turned on at a constant nebulization mode and the cone mask firmly held in place during the duration of the nebulization. Once the dose has been nebulized (i.e., when the nebulizer reservoir is empty), the face mask will be removed and the nebulizer switched off. The lamb will then be returned to its cage and general health (alertness, responsiveness, ability to stand and move) will be monitored for 10 minutes.

### Pharmacokinetics of Quads in Neonatal Lambs

[2474] Four independent studies will be performed in SARS-CoV-2-infected neonatal lambs. In all of these studies, blood samples will be taken at selected time points followingthe first dose and all the subsequent doses for pharmacokinetic (PK) purposes. On Day 6, bronchoalveolar lavage fluid (BALF) sampling will be performed post-mortem for PK analysis in the lung compartment. Once daily administration of Quad via inhalation for 5 or 3 consecutive days is expected to result in high concentrations of Quad in lung epithelial lining fluid (ELF). A dose-dependent increase in ELF concentrations is expected to be seen on day 6.

### Effect of Daily Quad Administration to Neonatal Lambs When Started on Day 1 Post-infection

[2475] To assess the therapeutic efficacy of Quad when administered by inhalation, thirteen lambs (twelve lambs for analysis) will be inoculated with SARS-CoV-2 virus on day 0. The day after infection (day 1), the lambs will be randomized to either the placebo group or to Quad dose groups (0.3, 3 or 1 mg/kg) and treated daily by inhalation for 5 consecutive days. Lambs will undergo daily physical examinations and body weights, heart rates, rectal temperatures, respiratory distress and viral infection-related symptoms will be recorded. On day 6, the animals will be euthanized and lung lavage samples and lung tissues will be obtained for analysis of viral load in lung, histopathology and immunohistochemical analysis. Viral inoculation by inhalation will be confirmed for robust infection of all the analyzed lambs by reverse transcription quantitative polymerase chain reaction (RT-qPCR) performed on BALF and lung tissue. In the placebo-treated lambs, we expect gross and microscopic lung lesions induced by viral infection. We expect that treatment of lambs with Quad at all three doses will result in significant reductions in viral RNA copy numbers (eg, that range from 1.4 to 1.8 Log10 viral RNA copies/mL in BALF and between 0.8 to 1.9 Log10 viral RNA copies/mg in lung tissue). We expect that treated lambs will have much lower or undetectable infectious virus.

### Example 37: Anti-SARS-CoV-2 Quads to Combat Viral Mutation & Evolution

[2476] Since SARS-CoV-2 first emerged, recurrent mutations in spike have occurred during both human-to-human transmission (and spillover/spillback events between humans and animals. Among mutations associated with enhancement of human-to-human transmission, N501Y occurred in three distinct emerging human variants: B.1.1.7 lineage (or 20IB/501Y.V1), B.1.351 lineage (or 20H/501Y.V2), and P.1 lineage (or 20J/501Y.V3) that were originally identified in the United Kingdom, South Africa and Japan/Brazil, respectively. The key involvement of residue 501 in ACE2 binding may contribute to increased prevalence of mutations at this site in multiple distinct SARS-CoV-2 strains. The B.1.351 and P.1 lineages also carry the RBM mutations E484K and K417N/T. Meanwhile, the N-terminal domain (NTD) deletion AHV69-70 arose in the mink-associated Cluster V strain and in B.1.1.7. The B.1.1.7 also has ΔY144, and B.1.351 has a ΔLLA242-244 deletion. Other mutations that may facilitate immune escape (e.g., A222V, N439K and S477N) are frequently observed in patient samples. Three mutations in the receptor-binding motif (RBM) (Y453F, F486L and N501T), associated with cross-species transmission between minks and humans, emerged independently in distinct clusters, suggesting they could be vital points for new host adaptation. Additional selection pressures, not directly related to receptor adaptation may also exist, as evidenced by mutations outside the RBM in human-animal transmission (e.g., the N-terminal domain deletion AHV69-70, G261D and RBD point mutations V367F).

[2477] Mutations in the spike protein can have various impacts on antibody binding footprints and affinity, ranging from no effect to substantial impairment of recognition and binding. Amino acid substitutions or deletions that appeared once in spike might appear elsewhere, new variants having a different assortment of mutations may emerge, and current variants may acquire new single mutations. Thus, work was carried out to dissect the effects of key mutations individually to understand they affect binding molecule (antibody or Quad) activities. First, the binding affinity for full-length G614 HexaPro spike ectodomain and to the monomeric receptor-binding domain (RBD) was determined. Using high-throughput surface plasmon resonance analysis, those binding molecules that react with the RBD were sorted into different “communities”. Communities were defined by shared competition profiles in a matrix, in which each antibody was evaluated for its ability to either pair with or compete with other antibodies for binding to spike. Some additional communities of binding moleucles were identified against the NTD (N-terminal domain) by mapping of antigenic sites using electron microscopy. In total, 14 different communities that react with the spike S1 domain were identified. The antigenic landscape of spike determined by these 14 communities can be divided into binding footprints that: (a) overlap with the RBM (receptor-binding motif), (b) approach the RBD from the outer edge, (c) involve the inner face of the RBD and are accessible only in the “up” state, or (d) include the NTD.

[2478] To understand if certain binding molecule communities are more susceptible to particular emerging spike mutations than others, single-cycle VSV-based pseudoparticles bearing point mutations found in human and mink variants were generated and the susceptibility of each mutation to neutralization by the molecules was assessed. Notably, a Quad multimer comprising copies of variable domain QB-GB, which binds outside of the core RBM, was found to be resistant to all S1 mutations analyzed and retained neutralization comparable to the parent virus. This Quad was found to bind to the inner face of the RBD. Strong binding was observed (IC50 of 0.0017 µg/mL). Near 100% ACE2 blocking was surprisingly observed (99.84%), and yet the multimer does not contact core RBM residues. This Quad multimer and other multimers binding spike protein in the same region, therefore, may advantageously be more resistant to receptor-driven selection pressure.

### References

[2479] Ali, S.A. et al., 1999. Transferrin Trojan Horses as a Rational Approach for the Biological Delivery of Therapeutic Peptide Domains. Journal of Biological Chemistry, 274(34), pp.24066-24073.
[2480] Barbas et al. (1992) supra
[2481] Bentley, G.A. & Mariuzza, R.A., 1996. THE STRUCTURE OF THE T CELL ANTIGEN RECEPTOR. Annual Review of Immunology, 14(1), pp.563-590.
[2482] Binz, H.K. et al., 2003. Designing repeat proteins: well-expressed, soluble and stable proteins from combinatorial libraries of consensus ankyrin repeat proteins. Journal of molecular biology, 332(2), pp.489-503.
[2483] Bixby, K.A. et al., 1999. Zn2+-binding and molecular determinants of tetramerisation in voltage-gated K+ channels. Nature structural biology, 6(1), pp.38-43.
[2484] Borghouts, C., Kunz, C. & Groner, B., 2005. Peptide aptamers: recent developments for cancer therapy. Expert Opinion on Biological Therapy, 5(6), pp.783-797.
[2485] Breitling, F. et al., 1991. A surface expression vector for antibody screening. Gene, 104(2), pp.147-53.
[2486] Burton, D.R. et al., 1991. A large array of human monoclonal antibodies to type 1 human immunodeficiency virus from combinatorial libraries of asymptomatic seropositive individuals. Proceedings of the National Academy of Sciences of the United States of America, 88(22), pp.10134-7.
[2487] Chang, C.N., Landolfi, N.F. & Queen, C., 1991. Expression of antibody Fab domains on bacteriophage surfaces. Potential use for antibody selection. Journal of immunology (Baltimore, Md. : 1950), 147(10), pp.3610-4.
[2488] Chaudhary, V.K. et al., 1990. A rapid method of cloning functional variable-region antibody genes in Escherichia coli as single-chain immunotoxins. Proceedings of the National Academy of Sciences, 87(3), pp.1066-1070.
[2489] Chiswell, D.J. & McCafferty, J., 1992. Phage antibodies: will new “coliclonal” antibodies replace monoclonal antibodies? Trends in biotechnology, 10(3), pp.80-4.
[2490] Clackson, T. et al., 1991. Making antibody fragments using phage display libraries. Nature, 352(6336), pp.624-8.
[2491] Davis, M.M. & Bjorkman, P.J., 1988. T-cell antigen receptor genes and T-cell recognition. Nature, 334(6181), pp.395-402.
[2492] Ding, X.-F. et al., 2008. Characterization and Expression of a Human KCTD1 Gene Containing the BTB Domain, Which Mediates Transcriptional Repression and Homomeric Interactions. DNA and Cell Biology, 27(5), pp.257-265.
[2493] Fujiwara, Y. & Minor, D.L., 2008. X-ray Crystal Structure of a TRPM Assembly Domain Reveals an Antiparallel Four-stranded Coiled-coil. Journal of Molecular Biology, 383(4), pp.854-870.
[2494] Hawkins, R.E. & Winter, G., 1992. Cell selection strategies for making antibodies from variable gene libraries: trapping the memory pool. European journal of immunology, 22(3), pp.867-70.
[2495] Herrin, B.R. & Cooper, M.D., 2010. Alternative adaptive immunity in jawless vertebrates. Journal of immunology (Baltimore, Md. : 1950), 185(3), pp.1367-74.
[2496] Hoogenboom, H.R. et al., 1991. Multi-subunit proteins on the surface of filamentous phage: methodologies for displaying antibody (Fab) heavy and light chains. Nucleic acids research, 19(15), pp.4133-7.
[2497] Hosse, R.J., Rothe, A. & Power, B.E., 2006. A new generation of protein display scaffolds for molecular recognition. Protein science : a publication of the Protein Society, 15(1), pp.14-27.
[2498] Irving, R.A. et al., 2001. Ribosome display and affinity maturation: from antibodies to single V-domains and steps towards cancer therapeutics. Journal of immunological methods, 248(1-2), pp.31-45.
[2499] Jeffrey, P.D., Gorina, S. & Pavletich, N.P., 1995. Crystal structure of the tetramerisation domain of the p53 tumor suppressor at 1.7 angstroms. Science (New York, N.Y.), 267(5203), pp.1498-502.
[2500] Kang, A.S. et al., 1991. Linkage of recognition and replication functions by assembling combinatorial antibody Fab libraries along phage surfaces. Proceedings of the National Academy of Sciences, 88(10), pp.4363-4366.
[2501] Kohl, A. et al., 2003. Designed to be stable: Crystal structure of a consensus ankyrin repeat protein. Proceedings of the National Academy of Sciences, 100(4), pp.1700-1705.
[2502] Lerner, R.A. et al., 1992. Antibodies without immunization. Science (New York, N.Y.), 258(5086), pp.1313-4.
[2503] Liu, Y. et al., 2006. The tetramer structure of the Nervy homology two domain, NHR2, is critical for AML1/ETO’s activity. Cancer Cell, 9(4), pp.249-260.
[2504] Lowman, H.B. et al., 1991. Selecting high-affinity binding proteins by monovalent phage display. Biochemistry, 30(45), pp.10832-8.
[2505] . Marks et al. (1991) supra
[2506] Marks, J.D. et al., 1991. By-passing immunization. Human antibodies from V-gene libraries displayed on phage. Journal of molecular biology, 222(3), pp.581-97.
[2507] Marks, J.D. et al., 1992. Molecular evolution of proteins on filamentous phage. Mimicking the strategy of the immune system. The Journal of biological chemistry, 267(23), pp.16007-10.
[2508] McCafferty et al. (1990) supra
[2509] McCafferty, J. et al., 1990. Phage antibodies: filamentous phage displaying antibody variable domains. Nature, 348(6301), pp.552-4.
[2510] Moysey, R., Vuidepot, A.-L. & Boulter, J.M., 2004. Amplification and one-step expression cloning of human T cell receptor genes. Analytical biochemistry, 326(2), pp.284-6.
[2511] Panowski, S. et al., 2014. Site-specific antibody drug conjugates for cancer therapy. mAbs, 6(1), pp.34-45.
[2512] Parker, M.H. et al., 2005. Antibody mimics based on human fibronectin type three domain engineered for thermostability and high-affinity binding to vascular endothelial growth factor receptor two. Protein engineering, design & selection : PEDS, 18(9), pp.435-44.
[2513] Perez, H.L. et al., 2014. Antibody-drug conjugates: Current status and future directions. Drug Discovery Today, 19(7), pp.869-881.
[2514] Reddy Chichili, V.P., Kumar, V. & Sivaraman, J., 2013. Linkers in the structural biology of protein-protein interactions. Protein science : a publication of the Protein Society, 22(2), pp.153-67.
[2515] Shao, C.-Y., Secombes, C.J. & Porter, A.J., 2007. Rapid isolation of IgNAR variable single-domain antibody fragments from a shark synthetic library. Molecular immunology, 44(4), pp.656-65.
[2516] Silverman, J. et al., 2005. Multivalent avimer proteins evolved by exon shuffling of a family of human receptor domains. Nature Biotechnology, 23(12), pp.1556-1561.
[2517] Skerra, A., 2000. Lipocalins as a scaffold. Biochimica et Biophysica Acta (BBA) - Protein Structure and Molecular Enzymology, 1482(1-2), pp.337-350.
[2518] Thie, H. et al., 2009. Multimerization domains for antibody phage display and antibody production. New biotechnology, 26(6), pp.314-21.
[2519] Tonegawa, S., 1988. Somatic generation of immune diversity. Bioscience reports, 8(1), pp.3-26.
[2520] Walchli, S. et al., 2011. A Practical Approach to T-Cell Receptor Cloning and Expression M. M. Rodrigues, ed. PLoS ONE, 6(11), p.e27930.
[2521] Wikman, M. et al., 2004. Selection and characterization of HER2/neu-binding affibody ligands. Protein Engineering Design and Selection, 17(5), pp.455-462.
[2522] Young, P.A., Morrison, S.L. & Timmerman, J.M., 2014. Antibody-cytokine fusion proteins for treatment of cancer: Engineering cytokines for improved efficacy and safety. Seminars in Oncology, 41(5), pp.623-636.
[2523] Zahnd, C. et al., 2007. A designed ankyrin repeat protein evolved to picomolar affinity to Her2. Journal of molecular biology, 369(4), pp.1015-28.
[2524] Zhang, J. et al., 2009. Transient expression and purification of chimeric heavy chain antibodies. Protein Expression and Purification, 65(1), pp.77-82.
[2525] Expert Opinion on Investigational Drugs 16(6) 909-917 (June 2007)
[2526] Chapter 7 - Non- Antibody Scaffolds from Handbook of Therapeutic Antibodies (2007, edited by Stefan Dubel)
[2527] Adams, G.P. et al., 2006. Avidity-mediated enhancement of in vivo tumor targeting by single-chain Fv dimers. Clinical Cancer Research, 12(5), pp.1599-1605.
[2528] Alam, K. et al., 2018. A novel synthetic trivalent single chain variable fragment ( tri-scFv ) construction platform based on the SpyTag / SpyCatcher protein ligase system., pp.1-8.
[2529] Boruah, B.M. et al., 2013. Single Domain Antibody Multimers Confer Protection against Rabies Infection. PLoS ONE, 8(8).
[2530] Bru nker, P. et al., 2016. RG7386, a Novel Tetravalent FAP-DR5 Antibody, Effectively Triggers FAP-Dependent, Avidity-Driven DR5 Hyperclustering and Tumor Cell Apoptosis. Molecular Cancer Therapeutics, 15(5), pp.946-957. Available at: http://mct.aacrjournals.org/cgi/doi/10.1158/1535-7163.MCT-15-0647.
[2531] Li, L. et al., 2018. Amplification of CD20 Cross-Linking in Rituximab-Resistant B-Lymphoma Cells Enhances Apoptosis Induction by Drug-Free Macromolecular Therapeutics. ACS Nano, 12(4), pp.3658-3670.
[2532] Mayes, P.A., Hance, K.W. & Hoos, A., 2018. The promise and challenges of immune agonist antibody development in cancer. Nature Reviews Drug Discovery, 17(7), pp.509-527.
[2533] Rudnick, S.I. & Adams, G.P., 2009. Affinity and Avidity in Antibody-Based Tumor Targeting. Cancer Biotherapy & Radiopharmaceuticals, 24(2), pp.155-161. Available at: http://www.liebertonline.com/doi/abs/10.1089/cbr.2009.0627.
[2534] Shen, C. et al., 2019. An IgM antibody targeting the receptor binding site of influenza B blocks viral infection with great breadth and potency. Theranostics, 9(1), pp.210-231. Available at: http://www.thno.org/v09p0210.htm.
[2535] Slaga, D. et al., 2018. Avidity-based binding to HER2 results in selective killing of HER2-overexpressing cells by anti-HER2/CD3. Science Translational Medicine, 10(463).
[2536] Wu, A.M. et al., 2001. Multimerization of a chimeric anti-CD20 single-chain Fv-Fc fusion protein is mediated through variable domain exchange. Protein engineering, 14(12), pp.1025-1033.
[2537] Ying, T. et al., 2017. Fc engineering for Developing Therapeutic Bispecific Antibodies and Novel Scaffolds. Article, 8(January), p.1. Available at: www.frontiersin.org.Ying, T. et al., 2012. Soluble monomeric IgG1Fc. Journal of Biological Chemistry, 287(23), pp.19399-19408.
[2538] Shi, R et al. A human neutralizing antibody targets the receptor-binding site of SARS-CoV-2. Nature, Vol 584; 6 Aug. 2020.
[2539] Hansen, J et al. Studies in humanized mice and convalescent humans yield a SARS-CoV-2 antibody cocktail. Science 15 Jun. 2020.
[2540] T.J. Esparza, N.P. Martin, G.P. Anderson, E.R. Goldman and D.L. Brody, High affinity nanobodies block SARS-CoV-2 spike receptor binding domain interaction with human angiotensin converting enzyme, Sci. Rep. 10 (2020), pp. 1-13.
[2541] T.A. Seldon, K.E. Hughes, D.J. Munster, D.Y. Chin and M.L. Jones, Improved protein-A separation oƒ VH3ƒab from FC aƒter papain digestion oƒantibodies, J. Biomol. Tech. 22 (2012), pp. 50-52.

TABLE 1

p53 Sequences

| SEQ ID NO: | | AMINO ACID SEQUENCE | NOTES |
|---|---|---|---|
| 1 | Human p53 isoform 1 | MEEPQSDPSVEPPLSQETFSDLWKLLPENNVLSPLPSQAMDDLMLSPDDI EQWFTEDPGPDEAPRMPEAAPPVAPAPAAPTPAAPAPAPSWPLSSSVPSQ KTYQGSYGFRLGFLHSGTAKSVTCTYSPALNKMFCQLAKTCPVQLWVDST PPPGTRVRAMAIYKQSQHMTEVVRRCPHHERCSDSDGLAPPQHLIRVEGN LRVEYLDDRNTFRHSVVVPYEPPEVGSDCTTIHYNYMCNSSCMGGMNRRP ILTIITLEDSSGNLLGRNSFEVRVCACPGRDRRTEEENLRKKGEPHHELP PGSTKRALPNNTSSSPQPKKKPLDGEYFTLQIRGRERFEMFRELNEALEL KDAQAG KFPGGSRAHSSHLKSKKGQSTSRHKKLMFKTEGPDSD | Also known as: p53, p53alpha |
| | | | This isoform is denoted as the ‘canonical’ sequence. |
| | | | Tetramerisation sequence in underline bold (amino acid position numbers 325 to 356) |
| 2 | Human p53 isoform 2 | MEEPQSDPSVEPPLSQETFSDLWKLLPENNVLSPLPSQAMDDLMLSPDDI EQWFTEDPGPDEAPRMPEAAPPVAPAPAAPTPAAPAPAPSWPLSSSVPSQ KTYQGSYGFRLGFLHSGTAKSVTCTYSPALNKMFCQLAKTCPVQLWVDST PPPGTRVRAMAIYKQSQHMTEVVRRCPHHERCSDSDGLAPPQHLIRVEGN LRVEYLDDRNTFRHSVVVPYEPPEVGSDCTTIHYNYMCNS | Also known as: I9RET, p53beta The sequence of this isoform differs from the canonical sequence (isoform 1) as |
| | | SCMGGMNRRPILTIITLEDSSGNLLGRNSFEVRVCACPGRDRRTEEENLR KKGEPHHELPPGSTKRALPNNTSSSPQPKKKPLDGEYFTLQDQTSFQKEN C | follows: |
| | | | 332-341: IRGRERFEMF → DQTSFQKENC |
| | | | 342-393: Missing. |
| 3 | Human p53 isoform 3 | MEEPQSDPSVEPPLSQETFSDLWKLLPENNVLSPLPSQAMDDLMLSPDDI EQWFTEDPGPDEAPRMPEAAPPVAPAPAAPTPAAPAPAPSWPLSSSVPSQ KTYQGSYGFRLGFLHSGTAKSVTCTYSPALNKMFCQLAKTCPVQLWVDST PPPGTRVRAMAIYKQSQHMTEVVRRCPHHERCSDSDGLAPPQHLIRVEGN LRVEYLDDRNTFRHSVVVPYEPPEVGSDCTTIHYNYMCNSSCMGGMNRRP ILTIITLEDSSGNLLGRNSFEVRVCACPGRDRRTEEENLRKKGEPHHELP PGSTKRALPNNTSSSPQPKKKPLDGEYFTLQMLLDLRWCYFLINSS | Also known as: p53gamma |
| | | | The sequence of this isoform differs from the canonical sequence as follows: 332-346: IRGRERFEMFRELNE → MLLDLRWCYFLINSS |
| | | | 347-393: Missing |
| 4 | Human p53 | MDDLMLSPDDIEQWFTEDPGPDEAPRMPEAAPPVAPAPAAPTPAAPAPAP SWPLSSSVPSQKTYQGSYGFRLGFLHSGTAKSVTCTYSPALNKMFCQLAK TCPVQLWVDSTPPPGTRVRAMAIYKQSQHMTEVVRRCPHHERCSDSDGLA PPQHLIRVEGNLRVEYLDDRNTFRHSVVVP | Also known as: Del40-p53, Del40-p53alpha, p47 |
| | isoform 4 | YEPPEVGSDCTTIHYNYMCNSSCMGGMNRRPILTIITLEDSSGNLLGRNS FEVRVCACPGRDRRTEEENLRKKGEPHHELPPGSTKRALPNNTSSSPQPKK KPLDGEYFTLQIRGRERFEMFRELNEALELKDAQAGKEPGGSRAHSSHLK SKKGQSTSRHKKLMFKTEGPDSD | The sequence of this isoform differs from the canonical sequence as follows: |
| | | | 1-39: Missing. |
| 5 | Human p53 isoform 5 | MDDLMLSPDDIEQWFTEDPGPDEAPRMPEAAPPVAPAPAAPTPAAPAPAP SWPLSSSVPSQKTYQGSYGFRLGFLHSGTAKSVTCTYSPALNKMFCQLAK TCPVQLWVDSTPPPGTRVRAMAIYKQSQHMTEVVRRCPHHERCSDSDGLA PPQHLIRVEGNLRVEYLDDRNTFRHSVVVPYEPPEVGSDCTTIHYNYMCN SSCMGGMNRRPILTIITLEDSSGNLLGRNSFEVRVCACPGRDRRTEEENLR KKGEPHHELPPGSTKRALPNNTSSSPQPKKKPLDGEYFTLQDQTSFQKEN C | Also known as: Del40-p53beta. The sequence of this isoform differs from the canonical sequence as follows: |
| | | | 1-39: Missing. |
| | | | 332-341: IRGRERFEMF → DQTSFQKENC |
| | | | 342-393: Missing. |
| 6 | Human p53 isoform 6 | MDDLMLSPDDIEQWFTEDPGPDEAPRMPEAAPPVAPAPAAPTPAAPAPAP SWPLSSSVPSQKTYQGSYGFRLGFLHSGTAKSVTCTYSPALNKMFCQLAK TCPVQLWVDSTPPPGTRVRAMAIYKQSQHMTEVVRRCPHHERCSDSDGLA PPQHLIRVEGNLRVEYLDDRNTFRHSVVVPYEPPEVGSDCTTIHYNYMCN SSCMGGMNRRPILTIITLEDSSGNLLGRNSFEVRVCACPGRDRRTEEENLR KKGEPHHELPPGSTKRALPNNTSSSPQPKKKPLDGEYFTLQMLLDLRWCYF LINSS | Also known as: Del40-p53gamma. The sequence of this isoform differs from the canonical sequence as follows: |
| | | | 1-39: Missing. |
| | | | 332-346: IRGRERFEMFRELNE → MLLDLRWCYFLINSS |
| | | | 347-393: Missing. |
| 7 | Human p53 isoform 7 | MFCQLAKTCPVQLWVDSTPPPGTRVRAMAIYKQSQHMTEVVRRCPHHERC SDSDGLAPPQHLIRVEGNLRVEYLDDRNTFRHSVVVPYEPPEVGSDCTTI HYNYMCNSSCMGGMNRRPILTIITLEDSSGNLLGRNSFEVRVCACPGRDR RTEEENLRKKGEPHHELPPGSTKRALPNNT | Also known as: Dell33-p53, Dell33-p53alpha. The sequence of this isoform differs from the canonical sequence as follows: |
| | | SSSPQPKKKPLDGEYFTLQIRGRERFEMFRELNEALELKDAQAG KFPGGS RAHSSHLKSKKGQSTSRHKKLMFKTEGPDSD | 1-132: Missing. |
| 8 | Human p53 isoform 8 | MFCQLAKTCPVQLWVDSTPPPGTRVRAMAIYKQSQHMTEVVRRCPHHERCS DSDGLAPPQHLIRVEGNLRVEYLDDRNTFRHSVVVPYEPPEVGSDCTTIH YNYMCNSSCMGGMNRRPILTIITLEDSSGNLLGRNSFEVRVCACPGRDRRT EEENLRKKGEPHHELPPGSTKRALPNNTSSSPQPKKKPLDGEYFTLQDQT SFQKENC | Also known as: Dell133-p53beta. The sequence of this isoform differs from the canonical sequence as follows: |
| | | | 1-132: Missing. |
| | | | 332-341: IRGRERFEMF → DQTSFQKENC |
| | | | 342-393: Missing. |
| 9 | Human p53 isoform 9 | MFCQLAKTCPVQLWVDSTPPPGTRVRAMAIYKQSQHMTEVVRRCPHHERCS DSDGLAPPQHLIRVEGNLRVEYLDDRNTFRHSVVVPYEPPEVGSDCTTIH YNYMCNSSCMGGMNRRPIL | Also known as: Del133-p53gamma. The sequence of this isoform differs from the |
| | | TIITLEDSSGNLLGRNSFEVRVCACPGRDRRTEEENLRKKGEPHHELPPG STKRALPNNTSSSPQPKKKPLDGEYFTLQMLLDLRWCYFLINSS | canonical sequence as follows: |
| | | | 1-132: Missing. |
| | | | 332-346: IRGRERFEMFRELNE → MLLDLRWCYFLINSS |
| | | | 347-393: Missing. |
| 10 | A human p53-TD | GEYFTLQIRGRERFEMFRELNEALELKDAQAG | |
| 11 | A human p63-TD | RSPDDELLYLPVRGRETYEMLLKIKESLELMQYLPQHTIETYRQQQQQQH | |
| 12 | A human p73-TD | KKRRHGDEDTYYLQVRGRENFEILMKLKESLELMELVPQPLV | |

TABLE 2

Example Human Proteins Comprising a Tetramerisation Domain

| Protein Number | Uniprot Entry | Entry name | Protein names | Gene names |
|---|---|---|---|---|
| 1 | P04637 | P53 HUMAN | Cellular tumor antigen p53 (Antigen NY-CO-13) (Phosphoprotein p53) (Tumor suppressor p53) | TP53 P53 |
| 2 | Q719H9 | KCTD1 HUMAN | BTB/POZ domain-containing protein KCTD1 (Potassium channel tetramerisation domain-containing protein 1) | KCTD1 C18orf5 |
| 3 | P51787 | KCNQ1 HUMAN | Potassium voltage-gated channel subfamily KQT member 1 (IKs producing slow voltage-gated potassium channel subunit alpha KvLQT1) (KQT-like 1) (Voltage-gated potassium channel subunit Kv7.1) | KCNQ1KCNA8 KCNA9 KVLQT1 |
| 4 | Q06455 | MTG8_HUMAN | Protein CBFA2T1 (Cyclin-D-related protein) (Eight twenty one protein) (Protein ETO) (Protein MTG8) (Zinc finger MYND domain-containing protein 2) | RUNX1T1 AML1T1 CBFA2T1 CDR ETO MTG8 ZMYND2 |
| 5 | Q9H3F6 | BACD3 HUMAN | BTB/POZ domain-containing adapter for CUL3-mediated RhoA degradation protein 3 (hBACURD3) (BTB/POZ domain-containing protein KCTD10) (Potassium channel tetramerisation domain-containing protein 10) | KCTD 10 ULR061 MSTP028 |
| 6 | Q12809 | KCNH2 HUMAN | Potassium voltage-gated channel subfamily H member 2 (Eag | KCNH2 ERG ERG1 |
| | | | homolog) (Ether-a-go-go-related gene potassium channel 1) (ERG-1) (Eag-related protein 1) (Ether-a-go-go-related protein 1) (H-ERG) (hERG-1) (hERG1) (Voltage-gated potassium channel subunit Kv11. 1) | HERG |
| 7 | Q96SI1 | KCD15 HUMAN | BTB/POZ domain-containing protein KCTD15 (Potassium channel tetramerisation domain-containing protein 15) | KCTD15 |
| 8 | P02766 | TTHY HUMAN | Transthyretin (ATTR) (Prealbumin) (TBPA) | TTR PALB |
| 9 | Q14681 | KCTD2 HUMAN | BTB/POZ domain-containing protein KCTD2 (Potassium channel tetramerisation domain-containing protein 2) | KCTD2 KIAA0176 |
| 10 | Q7Z5Y7 | KCD20 HUMAN | BTB/POZ domain-containing protein KCTD20 (Potassium channel tetramerisation domain containing 20) | KCTD20 C6orf69 |
| 11 | P50552 | VASP_HUMAN | Vasodilator-stimulated phosphoprotein (VASP) | VASP |
| 12 | Q68DU8 | KCD16 HUMAN | BTB/POZ domain-containing protein KCTD16 (Potassium channel tetramerisation domain-containing protein 16) | KCTD16 KIAA1317 |
| 13 | Q09470 | KCNA1 HUMAN | Potassium voltage-gated channel subfamily A member 1 (Voltage-gated K(+) channel HuKI) (Voltage-gated potassium channel HBK1) (Voltage-gated potassium channel subunit Kv1.1) | KCNA1 |
| 14 | P13501 | CCL5_HUMAN | C-C motif chemokine 5 (EoCP) (Eosinophil chemotactic cytokine) (SIS-delta) (Small-inducible cytokine A5) (T cell-specific protein P228) (TCP228) (T-cell-specific protein | CCL5 D17S136E SCYA5 |
| | | | RANTES) [Cleaved into: RANTES(3-68); RANTES(4-68)] | |
| 15 | P08069 | IGF1R HUMAN | Insulin-like growth factor 1 receptor (EC 2.7.10.1) (Insulin-like growth factor I receptor) (IGF-I receptor) (CD antigen CD221) [Cleaved into: Insulin-like growth factor 1 receptor alpha chain; Insulin-like growth factor 1 receptor beta chain] | IGF1R |
| 16 | Q14003 | KCNC3 HUMAN | Potassium voltage-gated channel subfamily C member 3 (KSHIIID) (Voltage-gated potassium channel subunit Kv3.3) | KCNC3 |
| 17 | 015350 | P73_HUMAN | Tumor protein p73 (p53-like transcription factor) (p53-related protein) | TP73 P73 |
| 18 | Q12791 | KCMA1 HUMAN | Calcium-activated potassium channel subunit alpha-1 (BK channel) (BKCA alpha) (Calcium-activated potassium channel, subfamily M subunit alpha-1) (K(VCA)alpha) (KCa1.1) (Maxi K channel) (MaxiK) (Slo-alpha) (S1o1) (Slowpoke homolog) (Slo homolog) (hSlo) | KCNMA 1 KCNMA SLO |
| 19 | P42261 | GRIA1 HUMAN | Glutamate receptor 1 (GluR-1) (AMPA-selective glutamate receptor 1) (GluR-A) (GluR-K1) (Glutamate receptor ionotropic, AMPA 1) (GluA1) | GRIA1 GLUH1 GLUR1 |
| 20 | P22303 | ACES HUMAN | Acetylcholinesterase (AChE) (EC 3.1.1.7) | ACHE |
| 21 | P04040 | CATA_HUMAN | Catalase (EC 1.11.1.6) | CAT |
| 22 | Q9H8Y8 | GORS2 HUMAN | Golgi reassembly-stacking protein 2 (GRS2) (Golgi phosphoprotein 6) (GOLPH6) (Golgi reassembly-stacking protein of 55 kDa) (GRASP55) (p59) | GORASP2 GOLPH6 |
| 23 | P34897 | GLYM_HUMAN | Serine hydroxymethyltransferase, mitochondrial (SHMT) (EC 2.1.2.1) (Glycine hydroxymethyltransferase) (Serine methylase) | SHMT2 |
| 24 | P13760 | 2B14_HUMAN | HLA class II histocompatibility antigen, DRB1-4 beta chain (MHC class II antigen DRB1*4) (DR-4) (DR4) | HLA-DRB1 |
| 25 | P04229 | 2B 1 1_HUMAN | HLA class II histocompatibility antigen, DRB1-1 beta chain (MHC class II antigen DRB1* 1) (DR-1) (DR1) | HLA-DRB1 |
| 26 | P35914 | HMGCL HUMAN | Hydroxymethylglutaryl-CoA lyase, mitochondrial (HL) (HMG-CoA lyase) (EC 4.1.3.4) (3-hydroxy-3-methylglutarate-CoA lyase) | HMGCL |
| 27 | Q29974 | 2B1G_HUMAN | HLA class II histocompatibility antigen, DRB1-16 beta chain (MHC class II antigen DRB1* 16) (DR-16) (DR16) | HLA-DRB1 |
| 28 | Q9TQE0 | 2B19_HUMAN | HLA class II histocompatibility antigen, DRB_1-9 beta chain (MHC class II antigen DRB1*9) (DR-9) (DR9) | HLA-DRB1 |
| 29 | Q9UDR5 | AASS_HUMAN | Alpha-aminoadipic semialdehyde synthase, mitochondrial (LKR/SDH) [Includes: Lysine ketoglutarate reductase (LKR) (LOR) (EC 1.5.1.8); Saccharopine dehydrogenase (SDH) (EC 1.5.1.9)] | AASS |
| 30 | P13761 | 2B17_HUMAN | HLA class II histocompatibility antigen, DRB1-7 beta chain (MHC class II antigen DRB1*7) (DR-7) (DR7) | HLA-DRB1 |
| 31 | P49450 | CENPA_HUMAN | Histone H3-like centromeric protein A (Centromere autoantigen A) (Centromere protein A) (CENP-A) | CENPA |
| 32 | Q9Y2W7 | CSEN_HUMAN | Calsenilin (A-type potassium channel modulatory protein 3) (DRE-antagonist modulator) (DREAM) (Kv channel-interacting protein 3) (KChIP3) | KCNIP3 CSEN DREAM KCHIP3 |
| 33 | Q16630 | CPSF6_HUMAN | Cleavage and polyadenylation specificity factor subunit 6 (Cleavage and polyadenylation specificity factor 68 kDa subunit) (CFIm68) (CPSF 68 kDa subunit) (Pre-mRNA cleavage factor Im 68 kDa subunit) (Protein HPBRII-4/7) | CPSF6 CFIM68 |
| 34 | 043809 | CPSF5_HUMAN | Cleavage and polyadenylation specificity factor subunit 5 (Cleavage and polyadenylation specificity factor 25 kDa subunit) (CFIm25) (CPSF 25 kDa subunit) (Nucleoside diphosphate-linked moiety X motif 21) (Nudix motif 21) (Pre-mRNA cleavage factor Im 25 kDa subunit) | NUDT21 CFIM25 CPSF25 CPSF5 |
| 35 | Q8N684 | CPSF7_HUMAN | Cleavage and polyadenylation specificity factor subunit 7 (Cleavage and polyadenylation specificity factor 59 kDa subunit) (CFIm59) (CPSF 59 kDa subunit) (Pre-mRNA cleavage factor Im 59 kDa subunit) | CPSF7 |
| 36 | Q14999 | CUL7_HUMAN | Cullin-7 (CUL-7) | CUL7 KIAA0076 |
| 37 | Q9UI08 | EVL_HUMAN | Ena/VASP-like protein (Ena/vasodilator-stimulated phosphoprotein-like) | EVL RNB6 |
| 38 | Q05193 | DYN1_HUMAN | Dynamin-1 (EC 3.6.5.5) | DNM1 DNM |
| 39 | Q8N8S7 | ENAH HUMAN | Protein enabled homolog | ENAH MENA |
| 40 | Q96PP8 | GBP5_HUMAN | Guanylate-binding protein 5 (EC 3.6.5.-) (GBP-TA antigen) (GTP-binding protein 5) (GBP-5) (Guanine nucleotide-binding protein 5) | GBP5 UNQ2427/PRO4987 |
| 41 | Q92947 | GCDH_HUMAN | Glutaryl-CoA dehydrogenase, mitochondrial (GCD) (EC 1.3.8.6) | GCDH |
| 42 | Q13614 | MTMR2 HUMAN | Myotubularin-related protein 2 (Phosphatidylinositol-3,5-bisphosphate 3-phosphatase) (EC 3.1.3.95) (Phosphatidylinositol-3-phosphate phosphatase) (EC 3.1.3.64) | MTMR2 KIAA1073 |
| 43 | Q99784 | NOE1_HUMAN | Noelin (Neuronal olfactomedin-related ER localized protein) (Olfactomedin-1) | OLFM1 NOE1 NOEL1 |
| 44 | P50542 | PEX5_HUMAN | Peroxisomal targeting signal 1 receptor (PTS 1 receptor) (PTS1R) (PTS1-BP) (Peroxin-5) (Peroxisomal C-terminal targeting signal import receptor) (Peroxisome receptor 1) | PEX5 PXR1 |
| 45 | P42262 | GRIA2_HUMAN | Glutamate receptor 2 (GluR-2) (AMPA-selective glutamate receptor 2) (GluR-B) (GluR-K2) (Glutamate receptor ionotropic, AMPA 2) (GluA2) | GRIA2 GLUR2 |
| 46 | P48058 | GRIA4_HUMAN | Glutamate receptor 4 (GluR-4) (GluR4) (AMPA-selective glutamate receptor 4) (GluR-D) (Glutamate receptor | GRIA4 GLUR4 |
| | | | ionotropic, AMPA 4) (GluA4) | |
| 47 | P42263 | GRIA3_HUMAN | Glutamate receptor 3 (GluR-3) (AMPA-selective glutamate receptor 3) (GluR-C) (GluR-K3) (Glutamate receptor ionotropic, AMPA 3) (GluA3) | GRIA3 GLUR3 GLURC |
| 48 | 060741 | HCN1_HUMAN | Potassium/sodium hyperpolarization-activated cyclic nucleotide-gated channel 1 (Brain cyclic nucleotide-gated channel 1) (BCNG-1) | HCN1 BCNG1 |
| 49 | Q9UL51 | HCN2_HUMAN | Potassium/sodium hyperpolarization-activated cyclic nucleotide-gated channel 2 (Brain cyclic nucleotide-gated channel 2) (BCNG-2) | HCN2 BCNG2 |
| 50 | Q9Y3Q4 | HCN4_HUMAN | Potassium/sodium hyperpolarization-activated cyclic nucleotide-gated channel 4 | HCN4 |
| 51 | P04035 | HMDH_HUMAN | 3-hydroxy-3-methylglutaryl-coenzyme A reductase (HMG-CoA reductase) (EC 1.1.1.34) | HMGCR |
| 52 | Q8NCD3 | HJURP_HUMAN | Holliday junction recognition protein (14-3-3-associated AKT substrate) (Fetal liver-expressing gene 1 protein) (Up-regulated in lung cancer 9) | HJURP FAKTS FLEG1 URLC9 |
| 53 | Q9NZV8 | KCND2_HUMAN | Potassium voltage-gated channel subfamily D member 2 (Voltage-gated potassium channel subunit Kv4.2) | KCND2 KIAA1044 |
| 54 | P48547 | KCNC1_HUMAN | Potassium voltage-gated channel subfamily C member 1 (NGK2) (Voltage-gated potassium channel subunit Kv3.1) | KCNC1 |
| | | | (Voltage-gated potassium channel subunit Kv4) | |
| 55 | Q96CX2 | KCD12_HUMAN | BTB/POZ domain-containing protein KCTD12 (Pfetin) (Predominantly fetal expressed T1 domain) | KCTD12 C13orf2 KIAA1778 PFET1 |
| 56 | P16389 | KCNA2_HUMAN | Potassium voltage-gated channel subfamily A member 2 (NGK1) (Voltage-gated K(+) channel HuKIV) (Voltage-gated potassium channel HBK5) (Voltage-gated potassium channel subunit Kv1.2) | KCNA2 |
| 57 | P56696 | KCNQ4_HUMAN | Potassium voltage-gated channel subfamily KQT member 4 (KQT-like 4) (Potassium channel subunit alpha KvLQT4) (Voltage-gated potassium channel subunit Kv7.4) | KCNQ4 |
| 58 | Q9NXV2 | KCTD5_HUMAN | BTB/POZ domain-containing protein KCTD5 | KCTD5 |
| 59 | Q14721 | KCNB1_HUMAN | Potassium voltage-gated channel subfamily B member 1 (Delayed rectifier potassium channel 1) (DRK1) (h-DRK1) (Voltage-gated potassium channel subunit Kv2.1) | KCNB1 |
| 60 | Q86WG5 | MTMRD_HUMAN | Myotubularin-related protein 13 (SET-binding factor 2) | SBF2 CMT4B2 KIAA1766 MTMRl3 |
| 61 | Q15070 | OXA1L_HUMAN | Mitochondrial inner membrane protein OXA1L (Hsa) (OXA1Hs) (Oxidase assembly 1-like protein) (OXA1-like protein) | OXA1L |
| 62 | P11498 | PYC_HUMAN | Pyruvate carboxylase, mitochondrial (EC 6.4.1.1) (Pyruvic | PC |
| | | | carboxylase) (PCB) | |
| 63 | P33764 | S10A3_HUMAN | Protein S100-A3 (Protein S-100E) (S100 calcium-binding protein A3) | S100A3 S100E |
| 64 | P58743 | S26A5_HUMAN | Prestin (Solute carrier family 26 member 5) | SLC26A5 PRES |
| 65 | Q9UIL1 | SCOC_HUMAN | Short coiled-coil protein | SCOCSCOCO HRIHFB2072 |
| 66 | P02549 | SPTA1_HUMAN | Spectrin alpha chain, erythrocytic 1 (Erythroid alpha-spectrin) | SPTA1 SPTA |
| 67 | Q96QT4 | TRPM7_HUMAN | Transient receptor potential cation channel subfamily M member 7 (EC 2.7.11.1) (Channel-kinase 1) (Long transient receptor potential channel 7) (LTrpC-7) (LTrpC7) | TRPM7 CHAK1 LTRPC7 |
| 68 | Q9HCF6 | TRPM3_HUMAN | Transient receptor potential cation channel subfamily M member 3 (Long transient receptor potential channel 3) (LTrpC-3) (LTrpC3) (Melastatin-2) (MLSN2) | TRPM3 KIAA1616 LTRPC3 |
| 69 | Q7Z4N2 | TRPM1_HUMAN | Transient receptor potential cation channel subfamily M member 1 (Long transient receptor potential channel 1) (LTrpC1) (Melastatin-1) | TRPM1 LTRPC1 MLSN MLSN1 |
| 70 | Q9NQA5 | TRPV5_HUMAN | Transient receptor potential cation channel subfamily V member 5 (TrpV5) (Calcium transport protein 2) (CaT2) (Epithelial calcium channel 1) (ECaC) (ECaC1) (Osm-9-like TRP channel 3) (OTRPC3) | TRPV5 ECAC1 |
| 71 | Q9BX84 | TRPM6_HUMAN | Transient receptor potential cation channel subfamily M member 6 (EC 2.7.11.1) (Channel kinase 2) (Melastatin-related TRP cation channel 6) | TRPM6 CHAK2 |
| 72 | P49638 | TTPA_HUMAN | Alpha-tocopherol transfer protein (Alpha-TTP) | TTPA TPP 1 |
| 73 | Q8NBZ7 | UXS1_HUMAN | UDP-glucuronic acid decarboxylase 1 (EC 4.1.1.35) (UDP-glucuronate decarboxylase 1) (UGD) (UXS-1) | UXS1 UNQ2538/PRO6079 |
| 74 | Q13426 | XRCC4_HUMAN | DNA repair protein XRCC4 (X-ray repair cross-complementing protein 4) | XRCC4 |
| 75 | A0A0A6YY98 | A0A0A6YY98_HUMAN | Transient receptor potential cation channel subfamily V member 5 | TRPV5 |
| 76 | H0YLN8 | H0YLN8_HUMAN | Transient receptor potential cation channel subfamily M member 7 (Transient receptor potential cation channel, subfamily M, member 7, isoform CRA_c) | TRPM7 hCG_39859 |
| 77 | A0A0C4DFW9 | A0A0C4DFW9_HUMAN | Cellular tumor antigen p53 | TP73 hCG_19088 |
| 78 | G5E9G1 | G5E9G1_HUMAN | Transient receptor potential cation channel subfamily M member 3 (Transient receptor potential cation channel, subfamily M, member 3, isoform CRA_a) | TRPM3 hCG_2042991 |
| 79 | H7BYP 1 | H7BYP1_HUMAN | Transient receptor potential cation channel subfamily M member 3 (Transient receptor potential cation channel, subfamily M, member 3, isoform CRA_c) | TRPM3 hCG_2042991 |
| 80 | A0A024R4C3 | A0A024R4C3_HUMAN | Tumor protein p73, isoform CRA_a | TP73 hCG_19088 |
| 81 | A0A0S2Z4N5 | A0A0S2Z4N5_HUMAN | Tumor protein p63 isoform 1 (Tumor protein p73-like, isoform CRA_a) (Fragment) | TP63 TP73L hCG_16028 |
| 82 | A0A024R5V1 | A0A024R5V1_HUMAN | Transient receptor potential cation channel, subfamily M, member 7, isoform CRA_a | TRPM7 hCG_39859 |
| 83 | X5D8S6 | X5D8S6_HUMAN | Adenylosuccinate lyase (ASL) (EC 4.3.2.2) (Adenylosuccinase) (Fragment) | ADSL hCG_40060 |
| 84 | C9D7D0 | C9D7D0_HUMAN | Cellular tumor antigen p53 | TP63 |
| 85 | K7PPA8 | K7PPA8_HUMAN | Cellular tumor antigen p53 | TP53 |
| 86 | A2A3F4 | A2A3F4_HUMAN | Transient receptor potential cation channel subfamily M member 3 | TRPM3 |
| 87 | Q2XSC7 | Q2XSC7_HUMAN | Cellular tumor antigen p53 | TP53 |
| 88 | A0A024R209 | A0A024R209_HUMAN | Transient receptor potential cation channel, subfamily M, member 1, isoform CRA_a | TRPM1 hCG_37570 |
| 89 | Q1MSX0 | Q1MSX0_HUMAN | Cellular tumor antigen p53 (Fragment) | TP53 |
| 90 | A0A0G2JN34 | A0A0G2JN34_HUMAN | Transient receptor potential cation channel subfamily M member 1 | TRPM1 |
| 91 | H6U5S3 | H6U5S3_HUMAN | Cellular tumor antigen p53 (Fragment) | |
| 92 | H2EHT1 | H2EHT1_HUMAN | Cellular tumor antigen p53 | TP53 |
| 93 | H6U5S2 | H6U5S2_HUMAN | Cellular tumor antigen p53 (Fragment) | |
| 94 | B4DNI2 | B4DNI2_HUMAN | Cellular tumor antigen p53 | |
| 95 | C9D7C9 | C9D7C9_HUMAN | Cellular tumor antigen p53 | TP63 |
| 96 | B6E4X6 | B6E4X6_HUMAN | Cellular tumor antigen p53 | |
| 97 | A0A087WZU8 | A0A087WZU8_HUMAN | Cellular tumor antigen p53 | TP53 |
| 98 | K7PPU4 | K7PPU4_HUMAN | Cellular tumor antigen p53 | TP53 |
| 99 | A0A0U1RQC9 | A0A0U1RQC9_HUMAN | Cellular tumor antigen p53 | TP53 |
| 100 | Q5U0E4 | Q5U0E4_HUMAN | Cellular tumor antigen p53 | |
| 101 | Q53GA5 | Q53GA5_HUMAN | Cellular tumor antigen p53 (Fragment) | |
| 102 | A2A3F7 | A2A3F7_HUMAN | Transient receptor potential cation channel subfamily M member 3 | TRPM3 |
| 103 | B4DMH2 | B4DMH2_HUMAN | Cellular tumor antigen p53 | |
| 104 | B7Z8X6 | B7Z8X6_HUMAN | Cellular tumor antigen p53 | |
| 105 | A0A141PNN3 | A0A141PNN3_HUMAN | Cellular tumor antigen p53 | TP63 |
| 106 | A0A141PNN4 | A0A141PNN4_HUMAN | Cellular tumor antigen p53 | TP63 |
| 107 | A0A087X1Q1 | A0A087X1Q1_HUMAN | Cellular tumor antigen p53 | TP53 |
| 108 | E5RMA8 | E5RMA8_HUMAN | Cellular tumor antigen p53 | TP53 |
| 109 | A0A0S2Z4N6 | A0A0S2Z4N6_HUMAN | Tumor protein p63 isoform 2 (Fragment) | TP63 |
| 110 | E9PBI7 | E9PBI7_HUMAN | Transient receptor potential cation channel subfamily M member 3 | TRPM3 |
| 111 | A0A0G2JMR4 | A0A0G2JMR4_HUMAN | Transient receptor potential cation channel subfamily M member 1 | TRPM1 |
| 112 | Q9H637 | Q9H637_HUMAN | cDNA: FLJ22628 fis, clone HSI06177 | |
| 113 | A0A0G2JPN6 | A0A0G2JPN6_HUMAN | Transient receptor potential cation channel subfamily M | TRPM1 |
| | | | member 1 | |
| 114 | A0A024R212 | A0A024R212_HUMAN | Transient receptor potential cation channel, subfamily M, member 1, isoform CRA_b | TRPM1 hCG_37570 |
| 115 | A0A0G2JMJ5 | A0A0G2JMJ5_HUMAN | Transient receptor potential cation channel subfamily M member 1 | TRPM1 |
| 116 | H0YM61 | H0YM61_HUMAN | Transient receptor potential cation channel subfamily M member 1 (Fragment) | TRPM1 |
| 117 | H0YKU7 | H0YKU7_HUMAN | Transient receptor potential cation channel subfamily M member 1 (Fragment) | TRPM1 |
| 118 | A0A0A0MTQ9 | A0A0A0MTQ9_HUMAN | Transient receptor potential cation channel subfamily M member 1 (Fragment) | TRPM1 |
| 119 | A2A3F3 | A2A3F3_HUMAN | Transient receptor potential cation channel subfamily M member 3 | TRPM3 |

The amino acid and nucleotide sequences of each of these proteins and the TD thereof is incorportated herein by reference for use in the present invention and for potential inclusion in one or more claims herein.

TABLE 3

DNA sequences encoding Quad polypeptides

| | | |
|---|---|---|
| SEQ ID NO: | POLYPEPTIDE | NUCLEOTIDE SEQUENCE |
| 13 | Quad 1 | ATGAGCCTCGGGCTCCTGTGCTGTGGGGCCTTTTCTCTCCTGTGGGCAGG TCCAGTGAATGCCGGTGTCACTCAGACCCCAAAATTCCAGGTCCTGAAGA CAGGACAGAGCATGACACTGCAGTGTGCCCAGGATATGAACCATGAATAC ATGTCCTGGTATCGACAAGACCCAGGCATGGGGCTGAGGCTGATTCATTA CTCAGTTGCCATCCAGACAACTGACCAAGGAGAAGTCCCCAATGGCTACA ATGTCTCCAGATCAACCATCGAGGATTTCCCGCTCAGGCTGCTGTCGGCT GCTCCCTCCCAGACATCTGTGTACTTCTGTGCCAGCAGTTACCTGGGGAA CACCGGGGAGCTGTTTTTTGGAGAAGGCTCTAGGCTGACCGTACTGGAGG ACCTGAAAAACGTGTTCCCACCCGAGGTCGCTGTGTTTGAGCCATCAGAA GCAGAGATCTCCCACACCCAAAAGGCCACACTGGTGTGCCTGGCCACAG GCTTCTACCCCGACCATGTGGAGCTGAGCTGGTGGGTGAATGGGAAGGAG GTGCACAGTGGGGTCAGCACAGACCCGCAGCCCCTCAAGGAGCAGCCCGC CCTCAATGACTCCAGATACGCTCTGAGCAGCCGCCTGAGGGTCTCGGCCA CCTTCTGGCAGGACCCCCGCAACCACTTCCGCTGTCAAGTCCAGTTCTAC GGGCTCTCGGAGAATGACGAGTGGACCCAGGATAGGGCCAAACCCGTCAC CCAGATCGTCAGCGCCGAGGCCTGG |
| | | GGTAGAGCAGACGCCAGCACCAAGGGCCCCTCTGTGTTCCCTCTGGCCCCT TCCAGCAAGTCCACCTCTGGCGGAACAGCCGCTCTGGGCTGCCTCGTGAAG GACTACTTCCCCGAGCCTGTGACCGTGTCCTGGAACTCTGGCGCTCTGAC CAGCGGAGTGCACACCTTCCCTGCTGTGCTGCAGTCCTCCGGCCTGTACT CCCTGTCCTCCGTCGTGACCGTGCCTTCCAGCTCTCTGGGCACCCAGACC TACATCTGCAACGTGAACCACAAGCCCTCCAACACCAAGGTGGACAAGAA GGTGCTAACAGACAGAGAATGGGCAGAAGAGTGGAAACATCTTGACCATCT GTTAAACTGCATAATGGACATGGTAGAAAAAACAAGGCGATCTCTCACCG TACTAAGGCGGTGTCAAGAAGCAGACCGGGAAGAATTGAATTACTGGATC CGGCGGTACAGTGACGCCGAG |
| 14 | Quad 2 | ATGAGCCTCGGGCTCCTGTGCTGTGGGGCCTTTTCTCTCCTGTGGGCAGG TCCAGTGAATGCCGGTGTCACTCAGACCCCAAAATTCCAGGTCCTGAAGA CAGGACAGAGCATGACACTGCAGTGTGCCCAGGATATGAACCATGAATAC ATGTCCTGGTATCGACAAGACCCAGGCATGGGGCTGAGGCTGATTCATTAC TCAGTTGCCATCCAGACAACTGACCAAGGAGAAGTCCCCAATGGCTACAA TGTCTCCAGATCAACCATCGAGGATTTCCCGCTCAGGCTGCTGTCGGCTGC TCCCTCCCAGACATCTGTGTACTTCTGTGCCAGCAGTTACCTGGGGAACACC GGGGAGCTGTTTTTTGGAGAAGGCTCTAGGCTGACCGTACTGGAGGACCTG AAAAACGTGTTCCCACCCGAGGTCGCTGTGTTTGAGCCATCAGAAGCAGAGA TCTCCCACACCCAAAAG |
| | | GCCACACTGGTGTGCCTGGCCACAGGCTTCTACCCCGACCATGTGGAGCTGAG CTGGTGGGTGAATGGGAAGGAGGTGCACAGTGGGGTCAGCACAGACCCGC AGCCCCTCAAGGAGCAGCCCGCCCTCAATGACTCCAGATACGCTCTGAGC AGCCGCCTGAGGGTCTCGGCCACCTTCTGGCAGGACCCCCGCAACCACTTCC GCTGTCAAGTCCAGTTCTACGGGCTCTCGGAGAATGACGAGTGGACCCAGG ATAGGGCCAAACCCGTCACCCAGATCGTCAGCGCCGAGGCCTGGGGTAGA GCAGACGCCAGCACCAAGGGCCCCTCTGTGTTCCCTCTGGCCCCTTCCAG CAAGTCCACCTCTGGCGGAACAGCCGCTCTGGGCTGCCTCGTGAAGGACTAC TTCCCCGAGCCTGTGACCGTGTCCTGGAACTCTGGCGCTCTGACCAGCGG AGTGCACACCTTCCCTGCTGTGCTGCAGTCCTCCGGCCTGTACTCCCTGT CCTCCGTCGTGACCGTGCCTTCCAGCTCTCTGGGCACCCAGACCTACATC TGCAACGTGAACCACAAGCCCTCCAACACCAAGGTGGACAAGAAGGTGGG AGGAGGTGGGAGCCTAACAGACAGAGAATGGGCAGAAGAGTGGAAACATCT TGACCATCTGTTAAACTGCATAATGGACATGGTAGAAAAAACAAGGCGATCT CTCACCGTACTAAGGCGGTGTCAAGAAGCAGACCGGGAAGAATTGAATTACT GGATCCGGCGGTACAGTGACGCCGAG |
| 15 | Quad 3 | ATGAGCCTCGGGCTCCTGTGCTGTGGGGCCTTTTCTCTCCTGTGGGCAGGT CCAGTGAATGCCGGTGTCACTCAGACCCCAAAATTCCAGGTCCTGAAGACAG GACAGAGCATG |
| | | ACACTGCAGTGTGCCCAGGATATGAACCATGAATACATGTCCTGGTATCGACA AGACCCAGGCATGGGGCTGAGGCTGATTCATTACTCAGTTGCCATCCAGA CAACTGACCAAGGAGAAGTCCCCAATGGCTACAATGTCTCCAGATCAACC ATCGAGGATTTCCCGCTCAGGCTGCTGTCGGCTGCTCCCTCCCAGACATCTGT GTACTTCTGTGCCAGCAGTTACCTGGGGAACACCGGGGAGCTGTTTTTTG GAGAAGGCTCTAGGCTGACCGTACTGGAGGACCTGAAAAACGTGTTCCCACC CGAGGTCGCTGTGTTTGAGCCATCAGAAGCAGAGATCTCCCACACCCAAAAGG CCACACTGGTGTGCCTGGCCACAGGCTTCTACCCCGACCATGTGGAGCTGAG CTGGTGGGTGAATGGGAAGGAGGTGCACAGTGGGGTCTGCACAGACCCGCA GCCCCTCAAGGAGCAGCCCGCCCTCAATGACTCCAGATACGCTCTGAGCAGC CGCCTGAGGGTCTCGGCCACCTTCTGGCAGGACCCCCGCAACCACTTCCGC TGTCAAGTCCAGTTCTACGGGCTCTCGGAGAATGACGAGTGGACCCAGGAT AGGGCCAAACCCGTCACCCAGATCGTCAGCGCCGAGGCCTGGGGTAGAGCAG ACGCCAGCACCAAGGGCCCCTCTGTGTTCCCTCTGGCCCCTTCCAGCAAGTCC ACCTCTGGCGGAACAGCCGCTCTGGGCTGCCTCGTGAAGGACTACTTCCCC GAGCCTGTGACCGTGTCCTGGAACTCTGGCGCTCTGACCAGCGGAGTGCA CACCTTCCCTGCTGTGCTGCAGTCCTCCGGCCTGTACTCCCTGTCCTCCG TCGTGACCGTGCCTTCCAGCTCTCTGGGCACCCAGACCTACATCTGCAAC GTGAACCACAAGCCCTCCAACACCAAGGTGGACAAG |
| | | AAGGTGCTAACAGACAGAGAATGGGCAGAAGAGTGGAAACATCTTGACCA TCTGTTAAACTGCATAATGGACATGGTAGAAAAAACAAGGCGATCTCTCA CCGTACTAAGGCGGTGTCAAGAAGCAGACCGGGAAGAATTGAATTACTGG ATCCGGCGGTACAGTGACGCCGAG |
| 16 | Quad 4 | ATGAGCCTCGGGCTCCTGTGCTGTGGGGCCTTTTCTCTCCTGTGGGCAGG TCCAGTGAATGCCGGTGTCACTCAGACCCCAAAATTCCAGGTCCTGAAGA CAGGACAGAGCATGACACTGCAGTGTGCCCAGGATATGAACCATGAATAC ATGTCCTGGTATCGACAAGACCCAGGCATGGGGCTGAGGCTGATTCATTA CTCAGTTGCCATCCAGACAACTGACCAAGGAGAAGTCCCCAATGGCTACAATGT CTCCAGATCAACCATCGAGGATTTCCCGCTCAGGCTGCTGTCGGCTGCTCC CTCCCAGACATCTGTGTACTTCTGTGCCAGCAGTTACCTGGGGAACACCGGG GAGCTGTTTTTTGGAGAAGGCTCTAGGCTGACCGTACTGGAGGACCTGAAAA ACGTGTTCCCACCCGAGGTCGCTGTGTTTGAGCCATCAGAAGCAGAGATCTC CCACACCCAAAAGGCCACACTGGTGTGCCTGGCCACAGGCTTCTACCCCG ACCATGTGGAGCTGAGCTGGTGGGTGAATGGGAAGGAGGTGCACAGTGGG GTCTGCACAGACCCGCAGCCCCTCAAGGAGCAGCCCGCCCTCAATGACTC CAGATACGCTCTGAGCAGCCGCCTGAGGGTCTCGGCCACCTTCTGGCAGG ACCCCCGCAACCACTTCCGCTGTCAAGTCCAGTTCTACGGGCTCTCGGAGA ATGACGAGTGGACCCAGGATAGGGCCAAACCCGTCACCCAGATCGTCAGC GCCGAGGCCTGG |
| | | GGTAGAGCAGACGCCAGCACCAAGGGCCCCTCTGTGTTCCCTCTGGCCCCTTCCAGCAAG TCCACCTCTGGCGGAACAGCCGCTCTGGGCTGCCTCGTGAAGGACTACTTCCCCGAGCCT GTGACCGTGTCCTGGAACTCTGGCGCTCTGACCAGCGGAGTGCACACCTTCCCTGCTGTG CTGCAGTCCTCCGGCCTGTACTCCCTGTCCTCCGTCGTGACCGTGCCTTCCAGCTCTCTG GGCACCCAGACCTACATCTGCAACGTGAACCACAAGCCCTCCAACACCAAGGTGGACAAG AAGGTGGGAGGAGGTGGGAGCCTAACAGACAGAGAATGGGCAGAAGAGTGGAAACATCTT GACCATCTGTTAAACTGCATAATGGACATGGTAGAAAAAACAAGGCGATCTCTCACCGTA CTAAGGCGGTGTCAAGAAGCAGACCGGGAAGAATTGAATTACTGGATCCGGCGGTACAGT GACGCCGAG |
| 17 | Quad 5 | ATGAGCCTCGGGCTCCTGTGCTGTGGGGCCTTTTCTCTCCTGTGGGCAGGTCCA GTGAATGCCGGTGTCACTCAGACCCCAAAATTCCAGGTCCTGAAGACAGGACAGAGCATG ACACTGCAGTGTGCCCAGGATATGAACCATGAATACATGTCCTGGTATCGACAAGACCCA GGCATGGGGCTGAGGCTGATTCATTACTCAGTTGCCATCCAGACAACTGACCAAGGAGAA GTCCCCAATGGCTACAATGTCTCCAGATCAACCATCGAGGATTTCCCGCTCAGGCTGCTG TCGGCTGCTCCCTCCCAGACATCTGTGTACTTCTGTGCCAGCAGTTACCTGGGGAACACC GGGGAGCTGTTTTTTGGAGAAGGCTCTAGGCTGACCGTACTGGAGGACCTGAAAAACGTG |
| | | TTCCCACCCGAGGTCGCTGTGTTTGAGCCATCAGAAGCAGAGATCTCCCACACCCAAAAG GCCACACTGGTGTGCCTGGCCACAGGCTTCTACCCCGACCATGTGGAGCTGAGCTGGTGG GTGAATGGGAAGGAGGTGCACAGTGGGGTCTGCACAGACCCGCAGCCCCTCAAGGAGCAG CCCGCCCTCAATGACTCCAGATACGCTCTGAGCAGCCGCCTGAGGGTCTCGGCCACCTTC TGGCAGGACCCCCGCAACCACTTCCGCTGTCAAGTCCAGTTCTACGGGCTCTCGGAGAAT GACGAGTGGACCCAGGATAGGGCCAAACCCGTCACCCAGATCGTCAGCGCCGAGGCCTGG GGTAGAGCAGACCTAACAGACAGAGAATGGGCAGAAGAGTGGAAACATCTTGACCATCTG TTAAACTGCATAATGGACATGGTAGAAAAAACAAGGCGATCTCTCACCGTACTAAGGCGG TGTCAAGAAGCAGACCGGGAAGAATTGAATTACTGGATCCGGCGGTACAGTGACGCCGAG |
| 18 | Quad 6 | ATGAGCCTCGGGCTCCTGTGCTGTGGGGCCTTTTCTCTCCTGTGGGCAGGTCCA GTGAATGCCGGTGTCACTCAGACCCCAAAATTCCAGGTCCTGAAGACAGGACAGAGCATG ACACTGCAGTGTGCCCAGGATATGAACCATGAATACATGTCCTGGTATCGACAAGACCCA GGCATGGGGCTGAGGCTGATTCATTACTCAGTTGCCATCCAGACAACTGACCAAGGAGAA GTCCCCAATGGCTACAATGTCTCCAGATCAACCATCGAGGATTTCCCGCTCAGGCTGCTG TCGGCTGCTCCCTCCCAGACATCTGTGTACTTCTGTGCCAGCAGTTACCTGGGGAACACC |
| | | GGGGAGCTGTTTTTTGGAGAAGGCTCTAGGCTGACCGTACTGGAGGACCTGAAAAACGTG TTCCCACCCGAGGTCGCTGTGTTTGAGCCATCAGAAGCAGAGATCTCCCACACCCAAAAG GCCACACTGGTGTGCCTGGCCACAGGCTTCTACCCCGACCATGTGGAGCTGAGCTGGTGG GTGAATGGGAAGGAGGTGCACAGTGGGGTCTGCACAGACCCGCAGCCCCTCAAGGAGCAG CCCGCCCTCAATGACTCCAGATACGCTCTGAGCAGCCGCCTGAGGGTCTCGGCCACCTTC TGGCAGGACCCCCGCAACCACTTCCGCTGTCAAGTCCAGTTCTACGGGCTCTCGGAGAAT GACGAGTGGACCCAGGATAGGGCCAAACCCGTCACCCAGATCGTCAGCGCCGAGGCCTGG GGTAGAGCAGACGGAGGAGGTGGGAGCCTAACAGACAGAGAATGGGCAGAAGAGTGGAAA CATCTTGACCATCTGTTAAACTGCATAATGGACATGGTAGAAAAAACAAGGCGATCTCTC ACCGTACTAAGGCGGTGTCAAGAAGCAGACCGGGAAGAATTGAATTACTGGATCCGGCGG TACAGTGACGCCGAG |
| 19 | Quad 7 | ATGGAGACCCTCTTGGGCCTGCTTATCCTTTGGCTGCAGCTGCAATGGGTGAGC AGCAAACAGGAGGTGACACAGATTCCTGCAGCTCTGAGTGTCCCAGAAGGAGAAAACTTG GTTCTCAACTGCAGTTTCACTGATAGCGCTATTTACAACCTCCAGTGGTTTAGGCAGGAC CCTGGGAAAGGTCTCACATCTCTGTTGCTTATTACACCTTGGCAGAGAGAGCAAACAAGT GGAAGACTTAATGCCTCGCTGGATAAATCATCAGGACGTAGTACTTTATACATTGCAGCT |
| | | TCTCAGCCTGGTGACTCAGCCACCTACCTCTGTGCTGTGAGGCCCCTGCTTGACGGAACA TACATACCTACATTTGGAAGAGGAACCAGCCTTATTGTTCATCCGTATATCCAGAACCCT GACCCTGCCGTGTACCAGCTGAGAGACTCTAAATCCAGTGACAAGTCTGTCTGCCTATTC ACCGATTTTGATTCTCAAACAAATGTGTCACAAAGTAAGGATTCTGATGTGTATATCACA GACAAAACTGTGCTAGACATGAGGTCTATGGACTTCAAGAGCAACAGTGCTGTGGCCTGG AGCAACAAATCTGACTTTGCATGTGCAAACGCCTTCAACAACAGCATTATTCCAGAAGAC ACCTTCTTCCCCAGCCCAGAAAGTTCCACGGTGGCCGCTCCCTCCGTGTTCATCTTCCCA CCTTCCGACGAGCAGCTGAAGTCCGGCACCGCTTCTGTCGTGTGCCTGCTGAACAACTTC TACCCCCGCGAGGCCAAGGTGCAGTGGAAGGTGGACAACGCCCTGCAGTCCGGCAACTCC CAGGAATCCGTGACCGAGCAGGACTCCAAGGACAGCACCTACTCCCTGTCCTCCACCCTG ACCCTGTCCAAGGCCGACTACGAGAAGCACAAGGTGTACGCCTGCGAAGTGACCCACCAG GGCCTGTCTAGCCCCGTGACCAAGTCTTTCAACCGGGGCGAGTGT |
| 20 | Quad 8 | ATGGAGACCCTCTTGGGCCTGCTTATCCTTTGGCTGCAGCTGCAATGGGTGAGC AGCAAACAGGAGGTGACACAGATTCCTGCAGCTCTGAGTGTCCCAGAAGGAGAAAACTTG GTTCTCAACTGCAGTTTCACTGATAGCGCTATTTACAACCTCCAGTGGTTTAGGCAGGAC |
| | | CCTGGGAAAGGTCTCACATCTCTGTTGCTTATTACACCTTGGCAGAGAGAGCAAACAAGT GGAAGACTTAATGCCTCGCTGGATAAATCATCAGGACGTAGTACTTTATACATTGCAGCT TCTCAGCCTGGTGACTCAGCCACCTACCTCTGTGCTGTGAGGCCCCTGCTTGACGGAACA TACATACCTACATTTGGAAGAGGAACCAGCCTTATTGTTCATCCGTATATCCAGAACCCT GACCCTGCCGTGTACCAGCTGAGAGACTCTAAATCCAGTGACAAGTCTGTCTGCCTATTC ACCGATTTTGATTCTCAAACAAATGTGTCACAAAGTAAGGATTCTGATGTGTATATCACA GACAAATGTGTGCTAGACATGAGGTCTATGGACTTCAAGAGCAACAGTGCTGTGGCCTGG AGCAACAAATCTGACTTTGCATGTGCAAACGCCTTCAACAACAGCATTATTCCAGAAGAC ACCTTCTTCCCCAGCCCAGAAAGTTCCACGGTGGCCGCTCCCTCCGTGTTCATCTTCCCA CCTTCCGACGAGCAGCTGAAGTCCGGCACCGCTTCTGTCGTGTGCCTGCTGAACAACTTC TACCCCCGCGAGGCCAAGGTGCAGTGGAAGGTGGACAACGCCCTGCAGTCCGGCAACTCC CAGGAATCCGTGACCGAGCAGGACTCCAAGGACAGCACCTACTCCCTGTCCTCCACCCTG ACCCTGTCCAAGGCCGACTACGAGAAGCACAAGGTGTACGCCTGCGAAGTGACCCACCAG GGCCTGTCTAGCCCCGTGACCAAGTCTTTCAACCGGGGCGAGTGT |
| 21 | Quad 9 | ATGGAGACCCTCTTGGGCCTGCTTATCCTTTGGCTGCAGCTGCAATGGGTGAGC |
| | | AGCAAACAGGAGGTGACACAGATTCCTGCAGCTCTGAGTGTCCCAGAAGGAGAAAACTTG GTTCTCAACTGCAGTTTCACTGATAGCGCTATTTACAACCTCCAGTGGTTTAGGCAGGAC CCTGGGAAAGGTCTCACATCTCTGTTGCTTATTACACCTTGGCAGAGAGAGCAAACAAGT GGAAGACTTAATGCCTCGCTGGATAAATCATCAGGACGTAGTACTTTATACATTGCAGCT TCTCAGCCTGGTGACTCAGCCACCTACCTCTGTGCTGTGAGGCCCCTGCTTGACGGAACA TACATACCTACATTTGGAAGAGGAACCAGCCTTATTGTTCATCCGTATATCCAGAACCCT GACCCTGCCGTGTACCAGCTGAGAGACTCTAAATCCAGTGACAAGTCTGTCTGCCTATTC ACCGATTTTGATTCTCAAACAAATGTGTCACAAAGTAAGGATTCTGATGTGTATATCACA GACAAATGTGTGCTAGACATGAGGTCTATGGACTTCAAGAGCAACAGTGCTGTGGCCTGG AGCAACAAATCTGACTTTGCATGTGCAAACGCCTTCAACAACAGCATTATTCCAGAAGAC ACCTTCTTCCCCAGCCCAGAAAGTTCC |
| 22 | Quad 10 | ATGAGCCTCGGGCTCCTGTGCTGTGGGGCCTTTTCTCTCCTGTGGGCAGGTCCA GTGAATGCCGGTGTCACTCAGACCCCAAAATTCCAGGTCCTGAAGACAGGACAGAGCATG ACACTGCAGTGTGCCCAGGATATGAACCATGAATACATGTCCTGGTATCGACAAGACCCA GGCATGGGGCTGAGGCTGATTCATTACTCAGTTGCCATCCAGACAACTGACCAAGGAGAA |
| | | GTCCCCAATGGCTACAATGTCTCCAGATCAACCATCGAGGATTTCCCGCTCAGGCTGCTG TCGGCTGCTCCCTCCCAGACATCTGTGTACTTCTGTGCCAGCAGTTACCTGGGGAACACC GGGGAGCTGTTTTTTGGAGAAGGCTCTAGGCTGACCGTACTGGAGGACCTGAAAAACGTG TTCCCACCCGAGGTCGCTGTGTTTGAGCCATCAGAAGCAGAGATCTCCCACACCCAAAAG GCCACACTGGTGTGCCTGGCCACAGGCTTCTACCCCGACCATGTGGAGCTGAGCTGGTGG GTGAATGGGAAGGAGGTGCACAGTGGGGTCAGCACAGACCCGCAGCCCCTCAAGGAGCAG CCCGCCCTCAATGACTCCAGATACGCTCTGAGCAGCCGCCTGAGGGTCTCGGCCACCTTC TGGCAGGACCCCCGCAACCACTTCCGCTGTCAAGTCCAGTTCTACGGGCTCTCGGAGAAT GACGAGTGGACCCAGGATAGGGCCAAACCCGTCACCCAGATCGTCAGCGCCGAGGCCTGG GGTAGAGCAGACGCCAGCACCAAGGGCCCCTCTGTGTTCCCTCTGGCCCCTTCCAGCAAG TCCACCTCTGGCGGAACAGCCGCTCTGGGCTGCCTCGTGAAGGACTACTTCCCCGAGCCT GTGACCGTGTCCTGGAACTCTGGCGCTCTGACCAGCGGAGTGCACACCTTCCCTGCTGTG CTGCAGTCCTCCGGCCTGTACTCCCTGTCCTCCGTCGTGACCGTGCCTTCCAGCTCTCTG GGCACCCAGACCTACATCTGCAACGTGAACCACAAGCCCTCCAACACCAAGGTGGACAAG AAGGTGCTAACAGACAGAGAATGGGCAGAAGAGTGGAAACATCTTGACCATCTGTTAAAC TGCATAATGGACATGGTAGAAAAAACAAGGCGATCTCTCACCGTACTAAGGCGGTGTCAA |
| | | GAAGCAGACCGGGAAGAATTGAATTACTGGATCCGGCGGTACAGTGACGCCGAGGCACCT ACTTCAAGTTCTACAAAGAAAACACAGCTACAACTGGAGCATTTACTGCTGGATTTACAG ATGATTTTGAATGGAATTAATAATTACAAGAATCCCAAACTCACCAGGATGCTCACATTT AAGTTTTACATGCCCAAGAAGGCCACAGAACTGAAACATCTTCAGTGTCTAGAAGAAGAA CTCAAACCTCTGGAGGAAGTGCTAAATTTAGCTCAAAGCAAAAACTTTCACTTAAGACCC AGGGACTTAATCAGCAATATCAACGTAATAGTTCTGGAACTAAAGGGATCTGAAACAACA TTCATGTGTGAATATGCTGATGAGACAGCAACCATTGTAGAATTTCTGAACAGATGGATT ACCTTTTGTCAAAGCATCATCTCAACACTGACT |
| 23 | Quad 11 | ATGAGCCTCGGGCTCCTGTGCTGTGGGGCCTTTTCTCTCCTGTGGGCAGGTCCA GTGAATGCCGGTGTCACTCAGACCCCAAAATTCCAGGTCCTGAAGACAGGACAGAGCATG ACACTGCAGTGTGCCCAGGATATGAACCATGAATACATGTCCTGGTATCGACAAGACCCA GGCATGGGGCTGAGGCTGATTCATTACTCAGTTGCCATCCAGACAACTGACCAAGGAGAA GTCCCCAATGGCTACAATGTCTCCAGATCAACCATCGAGGATTTCCCGCTCAGGCTGCTG TCGGCTGCTCCCTCCCAGACATCTGTGTACTTCTGTGCCAGCAGTTACCTGGGGAACACC GGGGAGCTGTTTTTTGGAGAAGGCTCTAGGCTGACCGTACTGGAGGACCTGAAAAACGTG TTCCCACCCGAGGTCGCTGTGTTTGAGCCATCAGAAGCAGAGATCTCCCACACCCAAAAG |
| | | GCCACACTGGTGTGCCTGGCCACAGGCTTCTACCCCGACCATGTGGAGCTGAGCTGGTGG GTGAATGGGAAGGAGGTGCACAGTGGGGTCAGCACAGACCCGCAGCCCCTCAAGGAGCAG CCCGCCCTCAATGACTCCAGATACGCTCTGAGCAGCCGCCTGAGGGTCTCGGCCACCTTC TGGCAGGACCCCCGCAACCACTTCCGCTGTCAAGTCCAGTTCTACGGGCTCTCGGAGAAT GACGAGTGGACCCAGGATAGGGCCAAACCCGTCACCCAGATCGTCAGCGCCGAGGCCTGG GGTAGAGCAGACGCCAGCACCAAGGGCCCCTCTGTGTTCCCTCTGGCCCCTTCCAGCAAG TCCACCTCTGGCGGAACAGCCGCTCTGGGCTGCCTCGTGAAGGACTACTTCCCCGAGCCT GTGACCGTGTCCTGGAACTCTGGCGCTCTGACCAGCGGAGTGCACACCTTCCCTGCTGTG CTGCAGTCCTCCGGCCTGTACTCCCTGTCCTCCGTCGTGACCGTGCCTTCCAGCTCTCTG GGCACCCAGACCTACATCTGCAACGTGAACCACAAGCCCTCCAACACCAAGGTGGACAAG AAGGTGGGAGGAGGTGGGAGCCTAACAGACAGAGAATGGGCAGAAGAGTGGAAACATCTT GACCATCTGTTAAACTGCATAATGGACATGGTAGAAAAAACAAGGCGATCTCTCACCGTA CTAAGGCGGTGTCAAGAAGCAGACCGGGAAGAATTGAATTACTGGATCCGGCGGTACAGT GACGCCGAGGCACCTACTTCAAGTTCTACAAAGAAAACACAGCTACAACTGGAGCATTTA CTGCTGGATTTACAGATGATTTTGAATGGAATTAATAATTACAAGAATCCCAAACTCACC AGGATGCTCACATTTAAGTTTTACATGCCCAAGAAGGCCACAGAACTGAAACATCTTCAG |
| | | TGTCTAGAAGAAGAACTCAAACCTCTGGAGGAAGTGCTAAATTTAGCTCAAAGCAAAAAC TTTCACTTAAGACCCAGGGACTTAATCAGCAATATCAACGTAATAGTTCTGGAACTAAAG GGATCTGAAACAACATTCATGTGTGAATATGCTGATGAGACAGCAACCATTGTAGAATTT CTGAACAGATGGATTACCTTTTGTCAAAGCATCATCTCAACACTGACT |
| 24 | Quad 12 | ATGAGCCTCGGGCTCCTGTGCTGTGGGGCCTTTTCTCTCCTGTGGGCAGGTCCA GTGAATGCCGGTGTCACTCAGACCCCAAAATTCCAGGTCCTGAAGACAGGACAGAGCATG ACACTGCAGTGTGCCCAGGATATGAACCATGAATACATGTCCTGGTATCGACAAGACCCA GGCATGGGGCTGAGGCTGATTCATTACTCAGTTGCCATCCAGACAACTGACCAAGGAGAA GTCCCCAATGGCTACAATGTCTCCAGATCAACCATCGAGGATTTCCCGCTCAGGCTGCTG TCGGCTGCTCCCTCCCAGACATCTGTGTACTTCTGTGCCAGCAGTTACCTGGGGAACACC GGGGAGCTGTTTTTTGGAGAAGGCTCTAGGCTGACCGTACTGGAGGACCTGAAAAACGTG TTCCCACCCGAGGTCGCTGTGTTTGAGCCATCAGAAGCAGAGATCTCCCACACCCAAAAG GCCACACTGGTGTGCCTGGCCACAGGCTTCTACCCCGACCATGTGGAGCTGAGCTGGTGG GTGAATGGGAAGGAGGTGCACAGTGGGGTCAGCACAGACCCGCAGCCCCTCAAGGAGCAG CCCGCCCTCAATGACTCCAGATACGCTCTGAGCAGCCGCCTGAGGGTCTCGGCCACCTTC TGGCAGGACCCCCGCAACCACTTCCGCTGTCAAGTCCAGTTCTACGGGCTCTCGGAGAAT |
| | | GACGAGTGGACCCAGGATAGGGCCAAACCCGTCACCCAGATCGTCAGCGCCGAGGCCTGG GGTAGAGCAGACGCCAGCACCAAGGGCCCCTCTGTGTTCCCTCTGGCCCCTTCCAGCAAG TCCACCTCTGGCGGAACAGCCGCTCTGGGCTGCCTCGTGAAGGACTACTTCCCCGAGCCT GTGACCGTGTCCTGGAACTCTGGCGCTCTGACCAGCGGAGTGCACACCTTCCCTGCTGTG CTGCAGTCCTCCGGCCTGTACTCCCTGTCCTCCGTCGTGACCGTGCCTTCCAGCTCTCTG GGCACCCAGACCTACATCTGCAACGTGAACCACAAGCCCTCCAACACCAAGGTGGACAAG AAGGTGGAACCCAAGTCCTGCGACAAGACCCACACCTGTCCCCCTTGTCCTCTAACAGAC AGAGAATGGGCAGAAGAGTGGAAACATCTTGACCATCTGTTAAACTGCATAATGGACATG GTAGAAAAAACAAGGCGATCTCTCACCGTACTAAGGCGGTGTCAAGAAGCAGACCGGGAA GAATTGAATTACTGGATCCGGCGGTACAGTGACGCCGAG |
| 25 | Quad 13 | ATGAGCCTCGGGCTCCTGTGCTGTGGGGCCTTTTCTCTCCTGTGGGCAGGTCCA GTGAATGCCGGTGTCACTCAGACCCCAAAATTCCAGGTCCTGAAGACAGGACAGAGCATG ACACTGCAGTGTGCCCAGGATATGAACCATGAATACATGTCCTGGTATCGACAAGACCCA GGCATGGGGCTGAGGCTGATTCATTACTCAGTTGCCATCCAGACAACTGACCAAGGAGAA GTCCCCAATGGCTACAATGTCTCCAGATCAACCATCGAGGATTTCCCGCTCAGGCTGCTG TCGGCTGCTCCCTCCCAGACATCTGTGTACTTCTGTGCCAGCAGTTACCTGGGGAACACC |
| | | GGGGAGCTGTTTTTTGGAGAAGGCTCTAGGCTGACCGTACTGGAGGACCTGAAAAACGTG TTCCCACCCGAGGTCGCTGTGTTTGAGCCATCAGAAGCAGAGATCTCCCACACCCAAAAG GCCACACTGGTGTGCCTGGCCACAGGCTTCTACCCCGACCATGTGGAGCTGAGCTGGTGG GTGAATGGGAAGGAGGTGCACAGTGGGGTCAGCACAGACCCGCAGCCCCTCAAGGAGCAG CCCGCCCTCAATGACTCCAGATACGCTCTGAGCAGCCGCCTGAGGGTCTCGGCCACCTTC TGGCAGGACCCCCGCAACCACTTCCGCTGTCAAGTCCAGTTCTACGGGCTCTCGGAGAAT GACGAGTGGACCCAGGATAGGGCCAAACCCGTCACCCAGATCGTCAGCGCCGAGGCCTGG GGTAGAGCAGACGCCAGCACCAAGGGCCCCTCTGTGTTCCCTCTGGCCCCTTCCAGCAAG TCCACCTCTGGCGGAACAGCCGCTCTGGGCTGCCTCGTGAAGGACTACTTCCCCGAGCCT GTGACCGTGTCCTGGAACTCTGGCGCTCTGACCAGCGGAGTGCACACCTTCCCTGCTGTG CTGCAGTCCTCCGGCCTGTACTCCCTGTCCTCCGTCGTGACCGTGCCTTCCAGCTCTCTG GGCACCCAGACCTACATCTGCAACGTGAACCACAAGCCCTCCAACACCAAGGTGGACAAG AAGGTGGAACCCAAGTCCTGCGACAAGACCCACACCTGTCCCCCTTGTCCTGGAGGAGGT GGGAGCCTAACAGACAGAGAATGGGCAGAAGAGTGGAAACATCTTGACCATCTGTTAAAC TGCATAATGGACATGGTAGAAAAAACAAGGCGATCTCTCACCGTACTAAGGCGGTGTCAA GAAGCAGACCGGGAAGAATTGAATTACTGGATCCGGCGGTACAGTGACGCCGAG |
| 26 | Quad 14 | ATGGAGCTGGGGCTGAGCTGGGTGGTCCTGGCTGCTCTACTACAAGGTGTCCAG GCTCAGGTTCAGCTGGTTGAAAGCGGTGGTGCACTGGTTCAGCCTGGTGGTAGCCTGCGT CTGAGCTGTGCAGCAAGCGGTTTTCCGGTTAATCGTTATAGCATGCGTTGGTATCGTCAG GCACCGGGTAAAGAACGTGAATGGGTTGCAGGTATGAGCAGTGCCGGTGATCGTAGCAGC TATGAAGATAGCGTTAAAGGTCGTTTTACCATCAGCCGTGATGATGCACGTAATACCGTT TATCTGCAAATGAATAGCCTGAAACCGGAAGATACCGCAGTGTATTATTGCAATGTTAAC GTGGGCTTTGAATATTGGGGTCAGGGCACCCAGGTTACCGTTAGCAGCAAACTAACAGAC AGAGAATGGGCAGAAGAGTGGAAACATCTTGACCATCTGTTAAACTGCATAATGGACATG GTAGAAAAAACAAGGCGATCTCTCACCGTACTAAGGCGGTGTCAAGAAGCAGACCGGGAA GAATTGAATTACTGGATCCGGCGGTACAGTGACGCCGAG |
| 27 | Quad 15 | ATGGAGCTGGGGCTGAGCTGGGTGGTCCTGGCTGCTCTACTACAAGGTGTCCAG GCTCAGGTTCAGCTGGTTGAAAGCGGTGGTGCACTGGTTCAGCCTGGTGGTAGCCTGCGT CTGAGCTGTGCAGCAAGCGGTTTTCCGGTTAATCGTTATAGCATGCGTTGGTATCGTCAG GCACCGGGTAAAGAACGTGAATGGGTTGCAGGTATGAGCAGTGCCGGTGATCGTAGCAGC TATGAAGATAGCGTTAAAGGTCGTTTTACCATCAGCCGTGATGATGCACGTAATACCGTT TATCTGCAAATGAATAGCCTGAAACCGGAAGATACCGCAGTGTATTATTGCAATGTTAAC |
| | | GTGGGCTTTGAATATTGGGGTCAGGGCACCCAGGTTACCGTTAGCAGCAAAGGAGGAGGT GGGAGCCTAACAGACAGAGAATGGGCAGAAGAGTGGAAACATCTTGACCATCTGTTAAAC TGCATAATGGACATGGTAGAAAAAACAAGGCGATCTCTCACCGTACTAAGGCGGTGTCAA GAAGCAGACCGGGAAGAATTGAATTACTGGATCCGGCGGTACAGTGACGCCGAG |
| 28 | Quad 18 | ATGGAGCTGGGGCTGAGCTGGGTGGTCCTGGCTGCTCTACTACAAGGTGTCCAG GCTCAGGTTCAGCTGGTTGAAAGCGGTGGTGCACTGGTTCAGCCTGGTGGTAGCCTGCGT CTGAGCTGTGCAGCAAGCGGTTTTCCGGTTAATCGTTATAGCATGCGTTGGTATCGTCAG GCACCGGGTAAAGAACGTGAATGGGTTGCAGGTATGAGCAGTGCCGGTGATCGTAGCAGC TATGAAGATAGCGTTAAAGGTCGTTTTACCATCAGCCGTGATGATGCACGTAATACCGTT TATCTGCAAATGAATAGCCTGAAACCGGAAGATACCGCAGTGTATTATTGCAATGTTAAC GTGGGCTTTGAATATTGGGGTCAGGGCACCCAGGTTACCGTTAGCAGCAAACTAACAGAC AGAGAATGGGCAGAAGAGTGGAAACATCTTGACCATCTGTTAAACTGCATAATGGACATG GTAGAAAAAACAAGGCGATCTCTCACCGTACTAAGGCGGTGTCAAGAAGCAGACCGGGAA GAATTGAATTACTGGATCCGGCGGTACAGTGACGCCGAGGCACCTACTTCAAGTTCTACA AAGAAAACACAGCTACAACTGGAGCATTTACTGCTGGATTTACAGATGATTTTGAATGGA ATTAATAATTACAAGAATCCCAAACTCACCAGGATGCTCACATTTAAGTTTTACATGCCC |
| | | AAGAAGGCCACAGAACTGAAACATCTTCAGTGTCTAGAAGAAGAACTCAAACCTCTGGAG GAAGTGCTAAATTTAGCTCAAAGCAAAAACTTTCACTTAAGACCCAGGGACTTAATCAGC AATATCAACGTAATAGTTCTGGAACTAAAGGGATCTGAAACAACATTCATGTGTGAATAT GCTGATGAGACAGCAACCATTGTAGAATTTCTGAACAGATGGATTACCTTTTGTCAAAGC ATCATCTCAACACTGACT |
| 29 | Quad 19 | ATGGAGCTGGGGCTGAGCTGGGTGGTCCTGGCTGCTCTACTACAAGGTGTCCAG GCTCAGGTTCAGCTGGTTGAAAGCGGTGGTGCACTGGTTCAGCCTGGTGGTAGCCTGCGT CTGAGCTGTGCAGCAAGCGGTTTTCCGGTTAATCGTTATAGCATGCGTTGGTATCGTCAG GCACCGGGTAAAGAACGTGAATGGGTTGCAGGTATGAGCAGTGCCGGTGATCGTAGCAGC TATGAAGATAGCGTTAAAGGTCGTTTTACCATCAGCCGTGATGATGCACGTAATACCGTT TATCTGCAAATGAATAGCCTGAAACCGGAAGATACCGCAGTGTATTATTGCAATGTTAAC GTGGGCTTTGAATATTGGGGTCAGGGCACCCAGGTTACCGTTAGCAGCAAAGGAGGAGGT GGGAGCCTAACAGACAGAGAATGGGCAGAAGAGTGGAAACATCTTGACCATCTGTTAAAC TGCATAATGGACATGGTAGAAAAAACAAGGCGATCTCTCACCGTACTAAGGCGGTGTCAA GAAGCAGACCGGGAAGAATTGAATTACTGGATCCGGCGGTACAGTGACGCCGAGGCACCT |
| | | ACTTCAAGTTCTACAAAGAAAACACAGCTACAACTGGAGCATTTACTGCTGGATTTACAG ATGATTTTGAATGGAATTAATAATTACAAGAATCCCAAACTCACCAGGATGCTCACATTT AAGTTTTACATGCCCAAGAAGGCCACAGAACTGAAACATCTTCAGTGTCTAGAAGAAGAA CTCAAACCTCTGGAGGAAGTGCTAAATTTAGCTCAAAGCAAAAACTTTCACTTAAGACCC AGGGACTTAATCAGCAATATCAACGTAATAGTTCTGGAACTAAAGGGATCTGAAACAACA TTCATGTGTGAATATGCTGATGAGACAGCAACCATTGTAGAATTTCTGAACAGATGGATT ACCTTTTGTCAAAGCATCATCTCAACACTGACT |
| 30 | Quad 20 | ATGGAGACCCTCTTGGGCCTGCTTATCCTTTGGCTGCAGCTGCAATGGGTGAGC AGCAAACAGGAGGTGACACAGATTCCTGCAGCTCTGAGTGTCCCAGAAGGAGAAAACTTG GTTCTCAACTGCAGTTTCACTGATAGCGCTATTTACAACCTCCAGTGGTTTAGGCAGGAC CCTGGGAAAGGTCTCACATCTCTGTTGCTTATTACACCTTGGCAGAGAGAGCAAACAAGT GGAAGACTTAATGCCTCGCTGGATAAATCATCAGGACGTAGTACTTTATACATTGCAGCT TCTCAGCCTGGTGACTCAGCCACCTACCTCTGTGCTGTGAGGCCCCTGCTTGACGGAACA TACATACCTACATTTGGAAGAGGAACCAGCCTTATTGTTCATCCGTATATCCAGAACCCT GACCCTGCCGTGTACCAGCTGAGAGACTCTAAATCCAGTGACAAGTCTGTCTGCCTATTC ACCGATTTTGATTCTCAAACAAATGTGTCACAAAGTAAGGATTCTGATGTGTATATCACA |
| | | GACAAAACTGTGCTAGACATGAGGTCTATGGACTTCAAGAGCAACAGTGCTGTGGCCTGG AGCAACAAATCTGACTTTGCATGTGCAAACGCCTTCAACAACAGCATTATTCCAGAAGAC ACCTTCTTCCCCAGCCCAGAAAGTTCCGCCAGCACCAAGGGCCCCTCTGTGTTCCCTCTG GCCCCTTCCAGCAAGTCCACCTCTGGCGGAACAGCCGCTCTGGGCTGCCTCGTGAAGGAC TACTTCCCCGAGCCTGTGACCGTGTCCTGGAACTCTGGCGCTCTGACCAGCGGAGTGCAC ACCTTCCCTGCTGTGCTGCAGTCCTCCGGCCTGTACTCCCTGTCCTCCGTCGTGACCGTG CCTTCCAGCTCTCTGGGCACCCAGACCTACATCTGCAACGTGAACCACAAGCCCTCCAAC ACCAAGGTGGACAAGAAGGTGTTGCATGGCACACGTCAAGAAGAAATGATTGATCACAGA CTAACAGACAGAGAATGGGCAGAAGAGTGGAAACATCTTGACCATCTGTTAAACTGCATA ATGGACATGGTAGAAAAAACAAGGCGATCTCTCACCGTACTAAGGCGGTGTCAAGAAGCA GACCGGGAAGAATTGAATTACTGGATCCGGCGGTACAGTGACGCCGAG |
| 31 | Quad 21 | ATGGAGACCCTCTTGGGCCTGCTTATCCTTTGGCTGCAGCTGCAATGGGTGAGC AGCAAACAGGAGGTGACACAGATTCCTGCAGCTCTGAGTGTCCCAGAAGGAGAAAACTTG GTTCTCAACTGCAGTTTCACTGATAGCGCTATTTACAACCTCCAGTGGTTTAGGCAGGAC CCTGGGAAAGGTCTCACATCTCTGTTGCTTATTACACCTTGGCAGAGAGAGCAAACAAGT GGAAGACTTAATGCCTCGCTGGATAAATCATCAGGACGTAGTACTTTATACATTGCAGCT |
| | | TCTCAGCCTGGTGACTCAGCCACCTACCTCTGTGCTGTGAGGCCCCTGCTTGACGGAACA TACATACCTACATTTGGAAGAGGAACCAGCCTTATTGTTCATCCGTATATCCAGAACCCT GACCCTGCCGTGTACCAGCTGAGAGACTCTAAATCCAGTGACAAGTCTGTCTGCCTATTC ACCGATTTTGATTCTCAAACAAATGTGTCACAAAGTAAGGATTCTGATGTGTATATCACA GACAAAACTGTGCTAGACATGAGGTCTATGGACTTCAAGAGCAACAGTGCTGTGGCCTGG AGCAACAAATCTGACTTTGCATGTGCAAACGCCTTCAACAACAGCATTATTCCAGAAGAC ACCTTCTTCCCCAGCCCAGAAAGTTCCGCCAGCACCAAGGGCCCCTCTGTGTTCCCTCTG GCCCCTTCCAGCAAGTCCACCTCTGGCGGAACAGCCGCTCTGGGCTGCCTCGTGAAGGAC TACTTCCCCGAGCCTGTGACCGTGTCCTGGAACTCTGGCGCTCTGACCAGCGGAGTGCAC ACCTTCCCTGCTGTGCTGCAGTCCTCCGGCCTGTACTCCCTGTCCTCCGTCGTGACCGTG CCTTCCAGCTCTCTGGGCACCCAGACCTACATCTGCAACGTGAACCACAAGCCCTCCAAC ACCAAGGTGGACAAGAAGGTGGGAGGAGGTGGGAGCTTGCATGGCACACGTCAAGAAGAA ATGATTGATCACAGACTAACAGACAGAGAATGGGCAGAAGAGTGGAAACATCTTGACCAT CTGTTAAACTGCATAATGGACATGGTAGAAAAAACAAGGCGATCTCTCACCGTACTAAGG CGGTGTCAAGAAGCAGACCGGGAAGAATTGAATTACTGGATCCGGCGGTACAGTGACGCC GAGGACTTAAAA |
| 32 | Quad 22 | ATGAGCCTCGGGCTCCTGTGCTGTGGGGCCTTTTCTCTCCTGTGGGCAGGTCCA GTGAATGCCGGTGTCACTCAGACCCCAAAATTCCAGGTCCTGAAGACAGGACAGAGCATG ACACTGCAGTGTGCCCAGGATATGAACCATGAATACATGTCCTGGTATCGACAAGACCCA GGCATGGGGCTGAGGCTGATTCATTACTCAGTTGCCATCCAGACAACTGACCAAGGAGAA GTCCCCAATGGCTACAATGTCTCCAGATCAACCATCGAGGATTTCCCGCTCAGGCTGCTG TCGGCTGCTCCCTCCCAGACATCTGTGTACTTCTGTGCCAGCAGTTACCTGGGGAACACC GGGGAGCTGTTTTTTGGAGAAGGCTCTAGGCTGACCGTACTGGAGGACCTGAAAAACGTG TTCCCACCCGAGGTCGCTGTGTTTGAGCCATCAGAAGCAGAGATCTCCCACACCCAAAAG GCCACACTGGTGTGCCTGGCCACAGGCTTCTACCCCGACCATGTGGAGCTGAGCTGGTGG GTGAATGGGAAGGAGGTGCACAGTGGGGTCAGCACAGACCCGCAGCCCCTCAAGGAGCAG CCCGCCCTCAATGACTCCAGATACGCTCTGAGCAGCCGCCTGAGGGTCTCGGCCACCTTC TGGCAGGACCCCCGCAACCACTTCCGCTGTCAAGTCCAGTTCTACGGGCTCTCGGAGAAT GACGAGTGGACCCAGGATAGGGCCAAACCCGTCACCCAGATCGTCAGCGCCGAGGCCTGG GGTAGAGCAGACACGGTGGCCGCTCCCTCCGTGTTCATCTTCCCACCTTCCGACGAGCAG CTGAAGTCCGGCACCGCTTCTGTCGTGTGCCTGCTGAACAACTTCTACCCCCGCGAGGCC |
| | | AAGGTGCAGTGGAAGGTGGACAACGCCCTGCAGTCCGGCAACTCCCAGGAATCCGTGACC GAGCAGGACTCCAAGGACAGCACCTACTCCCTGTCCTCCACCCTGACCCTGTCCAAGGCC GACTACGAGAAGCACAAGGTGTACGCCTGCGAAGTGACCCACCAGGGCCTGTCTAGCCCC GTGACCAAGTCTTTCAACCGGGGCGAGTGT |
| 33 | Quad 23 | ATGAACTTCGGGCTCAGCTTGATTTTCCTTGCCCTTATTTTAAAAGGTGTCCAG TGTGAGGTGCAACTGGTGGAGTCTGGGGGAGGCTTAGTGAAGCCTGGGGGGTCCCTGAAA CTCTCCTGTGCAGCCTCTGGACTCACTTTCAGTAGCTATGCCATGTCTTGGGTTCGCCAG ACTCCAGAGAAGAGGCTGGAGTGGGTCGCATCCATTAGTAGTGGTGGTTTCACCTACTAT CCAGACAGTGTGAAGGGCCGATTCACCATCTCCAGAGATAATGCCAGGAACATCCTGTAT CTGCAAATGAGCAGTCTGAGGTCTGAGGACACGGCCATGTATTACTGTGCAAGAGACGAG GTACGGGGGTACCTCGATGTCTGGGGCGCAGGGACCACGGTCACCGTTTCCTCGGCCAGC ACCAAGGGCCCCTCTGTGTTCCCTCTGGCCCCTTCCAGCAAGTCCACCTCTGGCGGAACA GCCGCTCTGGGCTGCCTCGTGAAGGACTACTTCCCCGAGCCTGTGACCGTGTCCTGGAAC TCTGGCGCTCTGACCAGCGGAGTGCACACCTTCCCTGCTGTGCTGCAGTCCTCCGGCCTG TACTCCCTGTCCTCCGTCGTGACCGTGCCTTCCAGCTCTCTGGGCACCCAGACCTACATC |
| | | TGCAACGTGAACCACAAGCCCTCCAACACCAAGGTGGACAAGAAGGTGCTAACAGACAGA GAATGGGCAGAAGAGTGGAAACATCTTGACCATCTGTTAAACTGCATAATGGACATGGTA GAAAAAACAAGGCGATCTCTCACCGTACTAAGGCGGTGTCAAGAAGCAGACCGGGAAGAA TTGAATTACTGGATCCGGCGGTACAGTGACGCCGAG |
| 34 | Quad 24 | ATGAACTTCGGGCTCAGCTTGATTTTCCTTGCCCTTATTTTAAAAGGTGTCCAG TGTGAGGTGCAACTGGTGGAGTCTGGGGGAGGCTTAGTGAAGCCTGGGGGGTCCCTGAAA CTCTCCTGTGCAGCCTCTGGACTCACTTTCAGTAGCTATGCCATGTCTTGGGTTCGCCAG ACTCCAGAGAAGAGGCTGGAGTGGGTCGCATCCATTAGTAGTGGTGGTTTCACCTACTAT CCAGACAGTGTGAAGGGCCGATTCACCATCTCCAGAGATAATGCCAGGAACATCCTGTAT CTGCAAATGAGCAGTCTGAGGTCTGAGGACACGGCCATGTATTACTGTGCAAGAGACGAG GTACGGGGGTACCTCGATGTCTGGGGCGCAGGGACCACGGTCACCGTTTCCTCGGCCAGC ACCAAGGGCCCCTCTGTGTTCCCTCTGGCCCCTTCCAGCAAGTCCACCTCTGGCGGAACA GCCGCTCTGGGCTGCCTCGTGAAGGACTACTTCCCCGAGCCTGTGACCGTGTCCTGGAAC TCTGGCGCTCTGACCAGCGGAGTGCACACCTTCCCTGCTGTGCTGCAGTCCTCCGGCCTG TACTCCCTGTCCTCCGTCGTGACCGTGCCTTCCAGCTCTCTGGGCACCCAGACCTACATC TGCAACGTGAACCACAAGCCCTCCAACACCAAGGTGGACAAGAAGGTGGGAGGAGGTGGG |
| | | AGCCTAACAGACAGAGAATGGGCAGAAGAGTGGAAACATCTTGACCATCTGTTAAACTGC ATAATGGACATGGTAGAAAAAACAAGGCGATCTCTCACCGTACTAAGGCGGTGTCAAGAA GCAGACCGGGAAGAATTGAATTACTGGATCCGGCGGTACAGTGACGCCGAG |
| 35 | Quad 25 | ATGAAATACCTATTGCCTACGGCAGCCGCTGGATTGTTATTACTCGCGGCCCAG CCGGCCATGGCGGCCTACAAAGATATCCAGATGACACAGACTACATCCTCCCTGTCTGCC TCTCTGGGAGACAGAGTCACCATCAGTTGCAGTGCAAGTCAGGGCATTAGCAATTATTTA AACTGGTATCAGCAGAAACCAGATGGAACTGTTAAACTCCTGATCTATTACACATCAAGT TTACACTCAGGAGTCCCATCAAGGTTCAGTGGCAGTGGGTCTGGGACAGATTATTCTCTC ACCATCAGCAACCTGGAACCTGAAGATATTGCCACTTATTATTGTCAGCAGTATAGCAAG CTTCCGTACACGTTCGGAGGGGGGACCAAGCTGGAAATAAAACGTACGGTGGCCGCTCCC TCCGTGTTCATCTTCCCACCTTCCGACGAGCAGCTGAAGTCCGGCACCGCTTCTGTCGTG TGCCTGCTGAACAACTTCTACCCCCGCGAGGCCAAGGTGCAGTGGAAGGTGGACAACGCC CTGCAGTCCGGCAACTCCCAGGAATCCGTGACCGAGCAGGACTCCAAGGACAGCACCTAC TCCCTGTCCTCCACCCTGACCCTGTCCAAGGCCGACTACGAGAAGCACAAGGTGTACGCC TGCGAAGTGACCCACCAGGGCCTGTCTAGCCCCGTGACCAAGTCTTTCAACCGGGGCGAG TGT |
| 36 | Quad 26 | ATGAACTTCGGGCTCAGCTTGATTTTCCTTGCCCTTATTTTAAAAGGTGTCCAG TGTGAGGTGCAACTGGTGGAGTCTGGGGGAGGCTTAGTGAAGCCTGGGGGGTCCCTGAAA CTCTCCTGTGCAGCCTCTGGACTCACTTTCAGTAGCTATGCCATGTCTTGGGTTCGCCAG ACTCCAGAGAAGAGGCTGGAGTGGGTCGCATCCATTAGTAGTGGTGGTTTCACCTACTAT CCAGACAGTGTGAAGGGCCGATTCACCATCTCCAGAGATAATGCCAGGAACATCCTGTAT CTGCAAATGAGCAGTCTGAGGTCTGAGGACACGGCCATGTATTACTGTGCAAGAGACGAG GTACGGGGGTACCTCGATGTCTGGGGCGCAGGGACCACGGTCACCGTTTCCTCGGCCAGC ACCAAGGGCCCCTCTGTGTTCCCTCTGGCCCCTTCCAGCAAGTCCACCTCTGGCGGAACA GCCGCTCTGGGCTGCCTCGTGAAGGACTACTTCCCCGAGCCTGTGACCGTGTCCTGGAAC TCTGGCGCTCTGACCAGCGGAGTGCACACCTTCCCTGCTGTGCTGCAGTCCTCCGGCCTG TACTCCCTGTCCTCCGTCGTGACCGTGCCTTCCAGCTCTCTGGGCACCCAGACCTACATC TGCAACGTGAACCACAAGCCCTCCAACACCAAGGTGGACAAGAAGGTGGAACCCAAGTCC TGCGACAAGACCCACACCTGTCCCCCTTGTCCTCTAACAGACAGAGAATGGGCAGAAGAG TGGAAACATCTTGACCATCTGTTAAACTGCATAATGGACATGGTAGAAAAAACAAGGCGA TCTCTCACCGTACTAAGGCGGTGTCAAGAAGCAGACCGGGAAGAATTGAATTACTGGATC |
| | | CGGCGGTACAGTGACGCCGAG |
| 37 | Quad 27 | ATGAACTTCGGGCTCAGCTTGATTTTCCTTGCCCTTATTTTAAAAGGTGTCCAG TGTGAGGTGCAACTGGTGGAGTCTGGGGGAGGCTTAGTGAAGCCTGGGGGGTCCCTGAAA CTCTCCTGTGCAGCCTCTGGACTCACTTTCAGTAGCTATGCCATGTCTTGGGTTCGCCAG ACTCCAGAGAAGAGGCTGGAGTGGGTCGCATCCATTAGTAGTGGTGGTTTCACCTACTAT CCAGACAGTGTGAAGGGCCGATTCACCATCTCCAGAGATAATGCCAGGAACATCCTGTAT CTGCAAATGAGCAGTCTGAGGTCTGAGGACACGGCCATGTATTACTGTGCAAGAGACGAG GTACGGGGGTACCTCGATGTCTGGGGCGCAGGGACCACGGTCACCGTTTCCTCGGCCAGC ACCAAGGGCCCCTCTGTGTTCCCTCTGGCCCCTTCCAGCAAGTCCACCTCTGGCGGAACA GCCGCTCTGGGCTGCCTCGTGAAGGACTACTTCCCCGAGCCTGTGACCGTGTCCTGGAAC TCTGGCGCTCTGACCAGCGGAGTGCACACCTTCCCTGCTGTGCTGCAGTCCTCCGGCCTG TACTCCCTGTCCTCCGTCGTGACCGTGCCTTCCAGCTCTCTGGGCACCCAGACCTACATC TGCAACGTGAACCACAAGCCCTCCAACACCAAGGTGGACAAGAAGGTGGAACCCAAGTCC TGCGACAAGACCCACACCTGTCCCCCTTGTCCTGGAGGAGGTGGGAGCCTAACAGACAGA GAATGGGCAGAAGAGTGGAAACATCTTGACCATCTGTTAAACTGCATAATGGACATGGTA GAAAAAACAAGGCGATCTCTCACCGTACTAAGGCGGTGTCAAGAAGCAGACCGGGAAGAA |
| | | TTGAATTACTGGATCCGGCGGTACAGTGACGCCGAG |
| 38 | Quad 28 | ATGGGATGGTCTTGTATAATTCTGTTCCTGGTGGCAACAGCAACAGGAGTGCAT AGCGAGGTGCAGCTGGTGGAGTCTGGGGGAGGCTTGGTACAGCCCGGCAGGTCCCTGAGA CTCTCCTGTGCGGCCTCTGGATTCACCTTTGATGATTATGCCATGCACTGGGTCCGGCAA GCTCCAGGGAAGGGCCTGGAATGGGTCTCAGCTATCACTTGGAATAGTGGTCACATAGAC TATGCGGACTCTGTGGAGGGCCGATTCACCATCTCCAGAGACAACGCCAAGAACTCCCTG TATCTGCAAATGAACAGTCTGAGAGCTGAGGATACGGCCGTATATTACTGTGCGAAAGTC TCGTACCTTAGCACCGCGTCCTCCCTTGACTATTGGGGCCAAGGTACCCTGGTCACCGTC TCGAGTGCCAGCACCAAGGGCCCCTCTGTGTTCCCTCTGGCCCCTTCCAGCAAGTCCACC TCTGGCGGAACAGCCGCTCTGGGCTGCCTCGTGAAGGACTACTTCCCCGAGCCTGTGACC GTGTCCTGGAACTCTGGCGCTCTGACCAGCGGAGTGCACACCTTCCCTGCTGTGCTGCAG TCCTCCGGCCTGTACTCCCTGTCCTCCGTCGTGACCGTGCCTTCCAGCTCTCTGGGCACC CAGACCTACATCTGCAACGTGAACCACAAGCCCTCCAACACCAAGGTGGACAAGAAGGTG TTGCATGGCACACGTCAAGAAGAAATGATTGATCACAGACTAACAGACAGAGAATGGGCA GAAGAGTGGAAACATCTTGACCATCTGTTAAACTGCATAATGGACATGGTAGAAAAAACA AGGCGATCTCTCACCGTACTAAGGCGGTGTCAAGAAGCAGACCGGGAAGAATTGAATTAC |
| | | TGGATCCGGCGGTACAGTGACGCCGAG |
| 39 | Quad 29 | ATGGGATGGTCTTGTATAATTCTGTTCCTGGTGGCAACAGCAACAGGAGTGCAT AGCGAGGTGCAGCTGGTGGAGTCTGGGGGAGGCTTGGTACAGCCCGGCAGGTCCCTGAGA CTCTCCTGTGCGGCCTCTGGATTCACCTTTGATGATTATGCCATGCACTGGGTCCGGCAA GCTCCAGGGAAGGGCCTGGAATGGGTCTCAGCTATCACTTGGAATAGTGGTCACATAGAC TATGCGGACTCTGTGGAGGGCCGATTCACCATCTCCAGAGACAACGCCAAGAACTCCCTG TATCTGCAAATGAACAGTCTGAGAGCTGAGGATACGGCCGTATATTACTGTGCGAAAGTC TCGTACCTTAGCACCGCGTCCTCCCTTGACTATTGGGGCCAAGGTACCCTGGTCACCGTC TCGAGTGCCAGCACCAAGGGCCCCTCTGTGTTCCCTCTGGCCCCTTCCAGCAAGTCCACC TCTGGCGGAACAGCCGCTCTGGGCTGCCTCGTGAAGGACTACTTCCCCGAGCCTGTGACC GTGTCCTGGAACTCTGGCGCTCTGACCAGCGGAGTGCACACCTTCCCTGCTGTGCTGCAG TCCTCCGGCCTGTACTCCCTGTCCTCCGTCGTGACCGTGCCTTCCAGCTCTCTGGGCACC CAGACCTACATCTGCAACGTGAACCACAAGCCCTCCAACACCAAGGTGGACAAGAAGGTG GGAGGAGGTGGGAGCTTGCATGGCACACGTCAAGAAGAAATGATTGATCACAGACTAACA GACAGAGAATGGGCAGAAGAGTGGAAACATCTTGACCATCTGTTAAACTGCATAATGGAC ATGGTAGAAAAAACAAGGCGATCTCTCACCGTACTAAGGCGGTGTCAAGAAGCAGACCGG |
| | | GAAGAATTGAATTACTGGATCCGGCGGTACAGTGACGCCGAG |
| 40 | Quad 30 | ATGGACATGAGGGTCCCTGCTCAGCTCCTGGGACTCCTGCTGCTCTGGCTCCCA GATACCAGATGTGACATCCAGATGACCCAGTCTCCATCCTCCCTGTCTGCATCTGTAGGG GACAGAGTCACCATCACTTGTCGGGCAAGTCAGGGCATCAGAAATTACTTAGCCTGGTAT CAGCAAAAACCAGGGAAAGCCCCTAAGCTCCTGATCTATGCTGCATCCACTTTGCAATCA GGGGTCCCATCTCGGTTCAGTGGCAGTGGATCTGGGACAGATTTCACTCTCACCATCAGC AGCCTACAGCCTGAAGATGTTGCAACTTATTACTGTCAAAGGTATAACCGTGCACCGTAT ACTTTTGGCCAGGGGACCAAGGTGGAAATCAAACGTACGGTGGCCGCTCCCTCCGTGTTC ATCTTCCCACCTTCCGACGAGCAGCTGAAGTCCGGCACCGCTTCTGTCGTGTGCCTGCTG AACAACTTCTACCCCCGCGAGGCCAAGGTGCAGTGGAAGGTGGACAACGCCCTGCAGTCC GGCAACTCCCAGGAATCCGTGACCGAGCAGGACTCCAAGGACAGCACCTACTCCCTGTCC TCCACCCTGACCCTGTCCAAGGCCGACTACGAGAAGCACAAGGTGTACGCCTGCGAAGTG ACCCACCAGGGCCTGTCTAGCCCCGTGACCAAGTCTTTCAACCGGGGCGAGTGT |
| 41 | Quad 31 | ATGGGATGGTCTTGTATAATTCTGTTCCTGGTGGCAACAGCAACAGGAGTGCAT AGCGAGGTCCAACTTGTCGAAAGTGGCGGCGGTTTGGTTCAACCTGGAGGTTCACTTCGA |
| | | CTGTCATGTGCAGCGAGCGGTTATACATTTACGAATTATGGCATGAATTGGGTTAGACAG GCACCAGGAAAGGGACTGGAGTGGGTAGGCTGGATCAATACCTACACAGGAGAACCAACG TATGCCGCAGACTTCAAACGACGGTTTACATTTTCCTTGGATACCTCTAAGTCTACAGCG TATCTCCAAATGAATTCACTTCGAGCGGAAGATACCGCGGTCTACTATTGCGCCAAATAC CCTCATTATTATGGGTCATCTCACTGGTATTTCGATGTCTGGGGTCAGGGAACACTGGTA ACCGTGTCATCCGCCAGCACCAAGGGCCCCTCTGTGTTCCCTCTGGCCCCTTCCAGCAAG TCCACCTCTGGCGGAACAGCCGCTCTGGGCTGCCTCGTGAAGGACTACTTCCCCGAGCCT GTGACCGTGTCCTGGAACTCTGGCGCTCTGACCAGCGGAGTGCACACCTTCCCTGCTGTG CTGCAGTCCTCCGGCCTGTACTCCCTGTCCTCCGTCGTGACCGTGCCTTCCAGCTCTCTG GGCACCCAGACCTACATCTGCAACGTGAACCACAAGCCCTCCAACACCAAGGTGGACAAG AAGGTGTTGCATGGCACACGTCAAGAAGAAATGATTGATCACAGACTAACAGACAGAGAA TGGGCAGAAGAGTGGAAACATCTTGACCATCTGTTAAACTGCATAATGGACATGGTAGAA AAAACAAGGCGATCTCTCACCGTACTAAGGCGGTGTCAAGAAGCAGACCGGGAAGAATTG AATTACTGGATCCGGCGGTACAGTGACGCCGAG |
| 42 | Quad 32 | ATGGGATGGTCTTGTATAATTCTGTTCCTGGTGGCAACAGCAACAGGAGTGCAT AGCGAGGTCCAACTTGTCGAAAGTGGCGGCGGTTTGGTTCAACCTGGAGGTTCACTTCGA |
| | | CTGTCATGTGCAGCGAGCGGTTATACATTTACGAATTATGGCATGAATTGGGTTAGACAG GCACCAGGAAAGGGACTGGAGTGGGTAGGCTGGATCAATACCTACACAGGAGAACCAACG TATGCCGCAGACTTCAAACGACGGTTTACATTTTCCTTGGATACCTCTAAGTCTACAGCG TATCTCCAAATGAATTCACTTCGAGCGGAAGATACCGCGGTCTACTATTGCGCCAAATAC CCTCATTATTATGGGTCATCTCACTGGTATTTCGATGTCTGGGGTCAGGGAACACTGGTA ACCGTGTCATCCGCCAGCACCAAGGGCCCCTCTGTGTTCCCTCTGGCCCCTTCCAGCAAG TCCACCTCTGGCGGAACAGCCGCTCTGGGCTGCCTCGTGAAGGACTACTTCCCCGAGCCT GTGACCGTGTCCTGGAACTCTGGCGCTCTGACCAGCGGAGTGCACACCTTCCCTGCTGTG CTGCAGTCCTCCGGCCTGTACTCCCTGTCCTCCGTCGTGACCGTGCCTTCCAGCTCTCTG GGCACCCAGACCTACATCTGCAACGTGAACCACAAGCCCTCCAACACCAAGGTGGACAAG AAGGTGGGAGGAGGTGGGAGCTTGCATGGCACACGTCAAGAAGAAATGATTGATCACAGA CTAACAGACAGAGAATGGGCAGAAGAGTGGAAACATCTTGACCATCTGTTAAACTGCATA ATGGACATGGTAGAAAAAACAAGGCGATCTCTCACCGTACTAAGGCGGTGTCAAGAAGCA GACCGGGAAGAATTGAATTACTGGATCCGGCGGTACAGTGACGCCGAG |
| 43 | Quad 33 | ATGGACATGAGGGTCCCTGCTCAGCTCCTGGGGCTCCTGCAGCTCTGGCTCTCA GGTGCCAGATGTGACATCCAAATGACCCAGAGTCCTTCCAGCCTCAGTGCGTCAGTGGGA |
| | | GATCGAGTGACGATAACGTGTTCTGCCAGCCAAGACATTTCCAACTATCTTAATTGGTAC CAGCAGAAACCGGGAAAGGCCCCGAAAGTGCTCATATACTTTACCAGCAGTCTTCACTCT GGAGTTCCTAGCCGGTTTAGCGGCTCAGGTAGTGGCACCGATTTCACTCTGACCATTAGT TCTCTTCAACCGGAAGATTTTGCAACCTACTATTGTCAGCAGTATTCAACGGTACCTTGG ACCTTCGGCCAAGGCACCAAAGTCGAGATTAAGCGTACGGTGGCCGCTCCCTCCGTGTTC ATCTTCCCACCTTCCGACGAGCAGCTGAAGTCCGGCACCGCTTCTGTCGTGTGCCTGCTG AACAACTTCTACCCCCGCGAGGCCAAGGTGCAGTGGAAGGTGGACAACGCCCTGCAGTCC GGCAACTCCCAGGAATCCGTGACCGAGCAGGACTCCAAGGACAGCACCTACTCCCTGTCC TCCACCCTGACCCTGTCCAAGGCCGACTACGAGAAGCACAAGGTGTACGCCTGCGAAGTG ACCCACCAGGGCCTGTCTAGCCCCGTGACCAAGTCTTTCAACCGGGGCGAGTGT |
| 44 | Quad 34 | ATGGATATGCGCGTCCCGGCACAGCTGCTCGGCTTGTTGTTGCTGTGGTTGAGA GCTAGGTGCGATATACAGATGACTCAGTCCCCTTCCAGTCTTTCAGCCAGTGTCGGCGAC CGGGTTACCATTACTTGTCGGGCAAGTCAATCTATAGATAGTTATTTGCATTGGTATCAA CAAAAACCAGGCAAAGCGCCTAAGTTGTTGATATATTCCGCATCTGAACTGCAATCAGGC GTTCCTTCACGCTTTTCTGGAAGCGGCAGCGGAACCGATTTCACTCTTACCATAAGTAGT |
| | | CTCCAGCCGGAGGATTTTGCTACATACTATTGTCAACAAGTAGTGTGGCGACCGTTCACC TTCGGACAGGGGACAAAAGTAGAAATCAAGCGGGGAGGAGGTGGGAGCTTGCATGGCACA CGTCAAGAAGAAATGATTGATCACAGACTAACAGACAGAGAATGGGCAGAAGAGTGGAAA CATCTTGACCATCTGTTAAACTGCATAATGGACATGGTAGAAAAAACAAGGCGATCTCTC ACCGTACTAAGGCGGTGTCAAGAAGCAGACCGGGAAGAATTGAATTACTGGATCCGGCGG TACAGTGACGCCGAG |
| 45 | Quad 36 | ATGGAGTTTGGCCTCAGTTGGTTGTTTTTGGTAGCGAAAATTAAAGTACAGTGT GAAGTCCAACTCCTGGAGAGCGGGGGGGGTCTGGTACAACCAGGCGGCTCACTGCGGCTT AGCTGCGCAGCCTCCGGGTTCACGTTCGCACATGAAACGATGGTGTGGGTGCGCCAGGCA CCGGGGAAGGGACTCGAATGGGTCTCACATATACCTCCTGACGGTCAGGATCCTTTTTAC GCGGACTCTGTGAAGGGACGATTCACAATAAGTAGAGACAATAGTAAGAACACCCTTTAT TTGCAGATGAACAGTCTGCGGGCGGAAGATACAGCAGTATATCATTGTGCCCTGCTGCCC AAACGAGGTCCGTGGTTTGACTATTGGGGACAGGGGACTCTCGTTACTGTAAGCTCCGGA GGAGGTGGGAGCTTGCATGGCACACGTCAAGAAGAAATGATTGATCACAGACTAACAGAC AGAGAATGGGCAGAAGAGTGGAAACATCTTGACCATCTGTTAAACTGCATAATGGACATG GTAGAAAAAACAAGGCGATCTCTCACCGTACTAAGGCGGTGTCAAGAAGCAGACCGGGAA |
| | | GAATTGAATTACTGGATCCGGCGGTACAGTGACGCCGAG |
| 46 | Quad 38 | ATGGACATGAGGGTCCCCGCTCAGCTCCTGGGGCTCCTGCTACTCTGGCTCCGA GCCAGATGTGATATACAGATGACCCAATCACCAAGCAGCTTGTCCGCTTCAGTGGGCGAC AGGGTAACTATAACATGCCGCGCAAGCCAATGGATAGGTCCAGAACTCTCATGGTACCAA CAAAAACCAGGGAAAGCGCCGAAACTGCTTATCTATCACACAAGCATTTTGCAATCTGGG GTACCTAGTCGATTCAGTGGCTCTGGCAGTGGGACTGACTTTACACTCACCATAAGTTCT CTCCAACCAGAGGACTTTGCAACATACTATTGTCAGCAATATATGTTTCAACCACGCACC TTTGGACAAGGCACAAAAGTTGAAATCCGCGGAGGAGGTGGGAGCTTGCATGGCACACGT CAAGAAGAAATGATTGATCACAGACTAACAGACAGAGAATGGGCAGAAGAGTGGAAACAT CTTGACCATCTGTTAAACTGCATAATGGACATGGTAGAAAAAACAAGGCGATCTCTCACC GTACTAAGGCGGTGTCAAGAAGCAGACCGGGAAGAATTGAATTACTGGATCCGGCGGTAC AGTGACGCCGAG |
| 47 | Quad 40 | ATGGACATGAGGGTCCCCGCTCAGCTCCTGGGGCTCCTGCTACTCTGGCTCCGA GCCAGATGTGATATTCAAATGACACAGTCACCAACGAGTCTTTCCGCGAGCGTTGGGGAC CGAGTGACAATAACTTGTCGAGCCTCTCAGTGGATTGGCAACTTGCTGGACTGGTATCAG CAAAAGCCGGGAGAAGCCCCGAAGCTGCTCATATACTATGCTTCCTTCCTCCAGAGTGGA |
| | | GTACCTAGCAGATTCAGCGGGGGGGGATTCGGGACTGATTTCACTCTTACAATCAGCTCT CTTCAACCCGAGGACTTCGCAACGTACTACTGTCAACAAGCTAACCCTGCGCCGCTTACT TTCGGACAAGGCACTAAGGTCGAAATTAAGCGAGGAGGAGGTGGGAGCTTGCATGGCACA CGTCAAGAAGAAATGATTGATCACAGACTAACAGACAGAGAATGGGCAGAAGAGTGGAAA CATCTTGACCATCTGTTAAACTGCATAATGGACATGGTAGAAAAAACAAGGCGATCTCTC ACCGTACTAAGGCGGTGTCAAGAAGCAGACCGGGAAGAATTGAATTACTGGATCCGGCGG TACAGTGACGCCGAG |
| 48 | Quad 42 | ATGGACATGAGGGTCCCCGCTCAGCTCCTGGGGCTCCTGCTACTCTGGCTCCGA GCCAGATGTGATATACAGATGACCCAATCACCAAGCAGCTTGTCCGCTTCAGTGGGCGAC AGGGTAACTATAACATGCCGCGCAAGCCAATGGATAGGTCCAGAACTCTCATGGTACCAA CAAAAACCAGGGAAAGCGCCGAAACTGCTTATCTATCACACAAGCATTTTGCAATCTGGG GTACCTAGTCGATTCAGTGGCTCTGGCAGTGGGACTGACTTTACACTCACCATAAGTTCT CTCCAACCAGAGGACTTTGCAACATACTATTGTCAGCAATATATGTTTCAACCACGCACC TTTGGACAAGGCACAAAAGTTGAAATCCGCGGAGGAGGTGGGAGCTTGCATGGCACACGT CAAGAAGAAATGATTGATCACAGACTAACAGACAGAGAATGGGCAGAAGAGTGGAAACAT CTTGACCATCTGTTAAACTGCATAATGGACATGGTAGAAAAAACAAGGCGATCTCTCACC |
| | | GTACTAAGGCGGTGTCAAGAAGCAGACCGGGAAGAATTGAATTACTGGATCCGGCGGTAC AGTGACGCCGAGGACTTAAAAGGTGGAGGAGGTAGCGATATTCAAATGACACAGTCACCA ACGAGTCTTTCCGCGAGCGTTGGGGACCGAGTGACAATAACTTGTCGAGCCTCTCAGTGG ATTGGCAACTTGCTGGACTGGTATCAGCAAAAGCCGGGAGAAGCCCCGAAGCTGCTCATA TACTATGCTTCCTTCCTCCAGAGTGGAGTACCTAGCAGATTCAGCGGGGGGGGATTCGGG ACTGATTTCACTCTTACAATCAGCTCTCTTCAACCCGAGGACTTCGCAACGTACTACTGT CAACAAGCTAACCCTGCGCCGCTTACTTTCGGACAAGGCACTAAGGTCGAAATTAAGCGA |
| 49 | Quad 44 | ATGGACATGAGGGTCCCCGCTCAGCTCCTGGGGCTCCTGCTACTCTGGCTCCGA GCCAGATGTGACATTCAGATGACTCAGTCACCATCCTCATTGTCTGCATCAGTTGGTGAC CGAGTTACGATCACATGTCGAGCAAGCCAAAATATAGATTCCAGACTTTCATGGTACCAG CAGAAGCCTGGTAAAGCGCCGAAACTCCTCATATATCGCACGAGCGTATTGCAATCTGGT GTGCCTTCTCGATTTTCAGGATCTGGGTCTGGCACTGACTTCACCTTGACAATATCTTCT CTTCAGCCCGAAGATTTCGCTACCTACTACTGCCAACAATGGGACATGTTTCCTCTGACC TTCGGACAGGGTACAAAGGTCGAGATTAAACGGGGAGGAGGTGGGAGCTTGCATGGCACA CGTCAAGAAGAAATGATTGATCACAGACTAACAGACAGAGAATGGGCAGAAGAGTGGAAA |
| | | CATCTTGACCATCTGTTAAACTGCATAATGGACATGGTAGAAAAAACAAGGCGATCTCTC ACCGTACTAAGGCGGTGTCAAGAAGCAGACCGGGAAGAATTGAATTACTGGATCCGGCGG TACAGTGACGCCGAG |
| 50 | Quad 46 | ATGGACATGAGGGTCCCCGCTCAGCTCCTGGGGCTCCTGCTACTCTGGCTCCGA GCCAGATGTGACATTCAGATGACTCAGTCACCATCCTCATTGTCTGCATCAGTTGGTGAC CGAGTTACGATCACATGTCGAGCAAGCCAAAATATAGATTCCAGACTTTCATGGTACCAG CAGAAGCCTGGTAAAGCGCCGAAACTCCTCATATATCGCACGAGCGTATTGCAATCTGGT GTGCCTTCTCGATTTTCAGGATCTGGGTCTGGCACTGACTTCACCTTGACAATATCTTCT CTTCAGCCCGAAGATTTCGCTACCTACTACTGCCAACAATGGGACATGTTTCCTCTGACC TTCGGACAGGGTACAAAGGTCGAGATTAAACGGGGAGGAGGTGGGAGCTTGCATGGCACA CGTCAAGAAGAAATGATTGATCACAGACTAACAGACAGAGAATGGGCAGAAGAGTGGAAA CATCTTGACCATCTGTTAAACTGCATAATGGACATGGTAGAAAAAACAAGGCGATCTCTC ACCGTACTAAGGCGGTGTCAAGAAGCAGACCGGGAAGAATTGAATTACTGGATCCGGCGG TACAGTGACGCCGAGGACTTAAAAGGTGGAGGAGGTAGCGATATACAGATGACTCAATCC CCTTCATCCCTCTCAGCTTCCGTAGGGGACAGAGTTACTATAACGTGTCGAGCTAGTCAA GACATAGGTGATCGCCTGAGGTGGTATCAGCAAAAACCGGGTAAAGCACCTAAACTCCTC |
| | | ATATATCATGGTTCCAGGTTGGAGTCAGGCGTGCCGTCACGATTCTCTGGGTCACGCTCT GGCACTGACTTCACATTGACGATTAGTTCTCTCCAGCCCGAAGACTTCGCCACCTACTAC TGTCAACAGCAATGGTTTCGCCCGTATACTTTTGGGCAGGGTACAAAGGTTGAGATTAAA CGG |

TABLE 4

Amino acid sequences of binding moieties, domains and peptides

| SEQ ID NO: | Domain/petptide | Product* | Domain/peptide Amino Acid Sequence |
|---|---|---|---|
| 51 | Anti-TNF alpha H | Humira™ | EVQLVESGGGLVQPGRSLRLSCAASGFTFDDYAMHWVRQAPGKGLEWVSAITWNSGHIDY ADSVEGRFTISRDNAKNSLYLQMNSLRAEDTAVYYCAKVSYLSTASSLDYWGQGTLVTVS S |
| 52 | Anti TNF alpha VL | Humira™ | DIQMTQSPSSLSASVGDRVTITCRASQGIRNYLAWYQQKPGKAPKLLIYAASTLQSGVPS RFSGSGSGTDFTLTISSLQPEDVATYYCQRYNRAPYTFGQGTKVEIKR |
| 53 | Anti-CD20 VH | Rituximab | QVQLQQPGAELVKPGASVKMSCKASGYTFTSYNMHWVKQTPGRGLEWIGAIYPGNGDTSY NQKFKGKATLTADKSSSTAYMQLSSLTSEDSAVYYCARSTYYGGDWYFNVWGAGTTVTVS A |
| 54 | Anti-CD20 VL | Rituximab | QIVLSQSPAILSASPGEKVTMTCRASSSVSYIHWFQQKPGSSPKPWIYATSNLASGVPVR FSGSGSGTSYSLTISRVEAEDAATYYCQQWTSNPPTFGGGTKLEIKR |
| 55 | Anti-VEGF VH | Avastin™ | EVQLVESGGGLVQPGGSLRLSCAASGYTFTNYGMNWVRQAPGKGLEWVGWINTYTGEPTY AADFKRRFTFSLDTSKSTAYLQMNSLRAEDTAVYYCAKYPHYYGSSHWYFDVWGQGTLVT VSS |
| 56 | Anti-VEGF VL | Avastin™ | DIQMTQSPSSLSASVGDRVTITCSASQDISNYLNWYQQKPGKAPKVLIYFTSSLHSGVPS RFSGSGSGTDFTLTISSLQPEDFATYYCQQYSTVPWTFGQGTKVEIKR |
| 57 | Anti-HER2 VH | Herceptin™ | EVQLVESGGGLVQPGGSLRLSCAASGFTFTDYTMDWVRQAPGKGLEWVADVNPNSGGSIY NQRFKGRFTLSVDRSKNTLYLQMNSLRAEDTAVYYCARNLGPSFYFDYWGQGTLVTVSS |
| 58 | Anti-HER2 VL | Herceptin™ | DIQMTQSPSSLSASVGDRVTITCKASQDVSIGVAWYQQKPGKAPKLLIYSASYRYTGVPS RFSGSGSGTDFTLTISSLQPEDFATYYCQQYYIYPYTFGQGTKVEIKR |
| 59 | Anti-IL6R VH | Actemra™ | EVQLQESGPGLVRPSQTLSLTCTVSGYSITSDHAWSWVRQPPGRGLEWIGYISYSGITTY NPSLKSRVTMLRDTSKNQFSLRLSSVTAADTAVYYCARSLARTTAMDYWGQGSLVTVSS |
| 60 | Anti-IL6R VL | Actemra™ | DIQMTQSPSSLSASVGDRVTITCRASQDISSYLNWQQKPGKAPKLLIYYTSRLHSGVPSRFS GSGSGTDFTFTISSLQPEDIATYYCQQGNTLPYTFGQGTKVEIKR |
| 61 | Anti-PD-1 VH | Nivolumab | QVQLVESGGGVVQPGRSLRLDCKASGITFSNSGMHWVRQAPGKGLEWVAVIWYDGSKRYY ADSVKGRFTISRDNSKNTLFLQMNSLRAEDTAVYYCATNDDYWGQGTLVTVSS |
| 62 | Anti-PD-1 VL | Nivolumab | EIVLTQSPATLSLSPGERATLSCRASQSVSSYLAWYQQKPGQAPRLLIYDASNRATGIPARFS GSGSGTDFTLTISSLEPEDFAVYYCQQSSNWPRTFGQGTKVEIKR |
| 63 | Anti-CTLA4 VH | Ipilimumab | QVQLVESGGGVVQPGRSLRLSCAASGFTFSSYTMHWVRQAPGKGLEWVTFISYDGNNKYY ADSVKGRFTISRDNSKNTLYLQMNSLRAEDTAIYYCARTGWLGPFDYWGQGTLVTVSS |
| 64 | Anti-CTLA4 VL | Ipilimumab | EIVLTQSPGTLSLSPGERATLSCRASQSVGSSYLAWYQQKPGQAPRLLIYGAFSRATGIP |
| | | | DRFSGSGSGTDFTLTISRLEPEDFAVYYCQQYGSSPWTFGQGTKVEIKR |
| 65 | Anti-TNFR1 dAb | DOM1h-131-206 VH | EVQLLESGGGLVQPGGSLRLSCAASGFTFAHETMVWVRQAPGKGLEWVSHIPPDGQDPFY ADSVKGRFTISRDNSKNTLYLQMNSLRAEDTAVYHCALLPKRGPWFDYWGQGTLVTVSS |
| 66 | Anti-TNFα dAb | TAR 1-5- 19 Vk | DIQMTQSPSSLSASVGDRVTITCRASQSIDSYLHUVI′QQKPGKAPKLLIYSASELQSGVPSRFS GSGSGTDFTLTISSLQPEDFATYYCQQVVWRPFTFGQGTKVEIKR |
| 67 | Anti-VEGF dAb | TAR15-10 Vk | DIQMTQSPSSLSASVGDRVTITCRASQWIGPELSWYQQKPGKAPKLLIYHTSILQSGVPSRFS GSGSGTDFTLTISSLQPEDFATYYCQQYMFQPRTFGQGTKVEIR |
| 68 | Anti-EGFR dAb | DOM16-39-109 Vk | DIQMTQSPTSLSASVGDRVTITCRASQWIGNLLDWYQQKPGEAPKLLIYYASFLQSGVPSRFS GGGFGTDFTLTISSLQPEDFATYYCQQANPAPLTFGQGTKVEIKR |
| 69 | Anti-CD38 dAb | DOM 11-3 Vk | DIQMTQSPSSLSASVGDRVTITCRASQNIDSRLSWYQQKPGKAPKLLIYRTSVLQSGVPSRFS GSGSGTDFTLTISSLQPEDFATYYCQQWDMFPLTFGQGTKVEIKR |
| 70 | Anti-CD 138 dAb | DOM 12-45 Vk | DIQMTQSPSSLSASVGDRVTITCRASQDIGDRLRWYQQKPGKAPKLLIYHGSRLESGVPSRFS GSRSGTDFTLTISSLQPEDFATYYCQQQWFRPYTFGQGTKVEIKR |
| 71 | Anti-NY-ESO-1 Vα | | KQEVTQIPAALSVPEGENLVLNCSFTDSAIYNLQWFRQDPGKGLTSLLLITPWQREQTSGRLN ASLDKSSGRSTLYIAASQPGDSATYLCAVRPLLDGTYIPTFGRGTSLIVHPY |
| 72 | Anti-NY-ESO-1 Vβ | | NAGVTQTPKFQVLKTGQSMTLQCAQDMNHEYMSWYRQDPGMGLRLIHYSVAIQTDQGEVP NGYNVSRSTIEDFPLRLLSAAPSQTSVYFCASSYLGNTGELFFGEGSRLTVL |
| 73 | IL2 | Human IL2 | APTSSSTKKTQLQLEHLLLDLQMILNGINNYKNPKLTRMLTFKFYMPKKATELKHLQCLEEELK PLEEVLNLAQSKNFHLRPRDLISNINVIVLELKGSETTFMCEYADETATIVEFLNRWITFCQSIIS |
| | | | TLT |
| 74 | Anti-GFP VH | Nanobody™ | QVQLVESGGALVQPGGSLRLSCAASGFPVNRYSMRWYRQAPGKEREWVAGMSSAGDRSS YEDSVKGRFTISRDDARNTVYLQMNSLKPEDTAVYYCNVNVGFEYWGQGTQVTVSS |
| 75 | Anti-IL1R1 | DOM4-122-23 Vk | DIQMTQSPSSLSASVGDRVTITCRASQSIIKHLKWYQQKPGKAPKLLIYGASRLQSGVPSRFS GSGSGTDFTLTISSLQPEDFATYYCQQGARWPQTFGQGTKVEIKR |
| 76 | FLT1 | EYLEA™ | SDTGRPFVEMYSEIPEIIHMTEGRELVIPCRVTSPNITVTLKKFPLDTLIPDGKRIIWDS RKGFIISNATYKEIGLLTCEATVNGHLYKTNYLTHRQTNTIIDV |
| 77 | KDR | EYLEA™ | VLSPSHGIELSVGEKLVLNCTARTELNVGIDFNUVEYPSSKHQHKKLVNRDLKTQSGSEMKKFL STLTIDGVTRSDQGLYTCAASSGLMTKKNSTFVRVHEK |
| 78 | | Aflibercept | SDTGRPFVEMYSEIPEIIHMTEGRELVIPCRVTSPNITVTLKKFPLDTLIPDGKRIIWDS RKGFIISNATYKEIGLLTCEATVNGHLYKTNYLTHRQTNTIIDVVLSPSHGIELSVGEKL VLNCTARTELNVGIDFNWEYPSSKHQHKKLVNRDLKTQSGSEMKKFLSTLTIDGVTRSDQ GLYTCAASSGLMTKKNSTFVRVHEKDKTHTCPPCPAPELLGGPSVFLFPPKPKDTLMISR TPEVTCVVVDVSHEDPEVKFNWYVDGVEVHNAKTKPREEQYNSTYRVVSVLTVLHQDWLN GKEYKCKVSNKALPAPIEKTISKAKGQPREPQVYTLPPSRDELTKNQVSLTCLVKGFYPS DIAVEWESNGQPENNYKTTPPVLDSDGSFFLYSKLTVDKSRWQQGNVFSCSVMHEALHNH |
| | | | YTQKSLSLSPG |
| 79 | GLP-1(7-37)-Pro9 | | HAPGTFTSDVSSYLEGQAAKEFIAWLVKGRG |
| 80 | Peptide YY | | IKPEAPGEDASPEELNRYYASLRHYLNLVTRQRY |
| 81 | EXENDIN-4 | | HGEGTFTSDLSKQMEEEAVRLFIEWLKNGGPSSGAPPPS |
| 82 | | DURAGLUTIDE™ | HGEGTFTSDVSSYLEEQAAKEFIAWLVKGGGGGGGSGGGGSGGGGSAESKYGPPCPPCPA PEAAGGPSVFLFPPKPKDTLMISRTPEVTCVVVDVSQEDPEVQFNWYVDGVEVHNAKTKPRE EQFNSTYRVVSVLTVLHQDWLNGKEYKCKVSNKGLPSSIEKTISKAKGQPREPQVYTLPPSQ EEMTKNQVSLTCLVKGFYPSDIAVEWESNGQPENNYKTTPPVLDSDGSFFLYSRLTVDKSRW QEGNVFSCSVMHEALHNHYTQKSLSLSLG |

∗indicates product comprising the domain.

TABLE 5

Amino acid sequences of Quad polypeptides

| SEQ ID NO: | POLYPEPTIDE | AMINO ACID SEQUENCE |
|---|---|---|
| 83 | Quad 1 | NAGVTQTPKFQVLKTGQSMTLQCAQDMNHEYMSWYRQDPGM GLRLIHYSVAIQTTDQGEVPNGYNVSRSTIEDFPLRLLSAAPSQTSVYFCASSYLGNTGE LFFGEGSRLTVLEDLKNVFPPEVAVFEPSEAEISHTQKATLVCLATGFYPDHVELSWWVN GKEVHSGVSTDPQPLKEQPALNDSRYALSSRLRVSATFWQDPRNHFRCQVQFYGLSENDE WTQDRAKPVTQIVSAEAWGRADASTKGPSVFPLAPSSKSTSGGTAALGCLVKDYFPEPVT VSWNSGALTSGVHTFPAVLQSSGLYSLSSVVTVPSSSLGTQTYICNVNHKPSNTKVDKKV LTDREWAEEWKHLDHLLNCIMDMVEKTRRSLTVLRRCQEADREELNYWIRRYSDAE |
| 84 | Quad 2 | NAGVTQTPKFQVLKTGQSMTLQCAQDMNHEYMSWYRQDPGM GLRLIHYSVAIQTTDQGEVPNGYNVSRSTIEDFPLRLLSAAPSQTSVYFCASSYLGNTGE LFFGEGSRLTVLEDLKNVFPPEVAVFEPSEAEISHTQKATLVCLATGFYPDHVELSWWVN GKEVHSGVSTDPQPLKEQPALNDSRYALSSRLRVSATFWQDPRNHFRCQVQFYGLSENDE WTQDRAKPVTQIVSAEAWGRADASTKGPSVFPLAPSSKSTSGGTAALGCLVKDYFPEPVT |
| | | VSWNSGALTSGVHTFPAVLQSSGLYSLSSVVTVPSSSLGTQTYICNVNHKPSNTKVDKKV GGGGSLTDREWAEEWKHLDHLLNCIMDMVEKTRRSLTVLRRCQEADREELNYWIRRYSDA E |
| 85 | Quad 3 | NAGVTQTPKFQVLKTGQSMTLQCAQDMNHEYMSWYRQDPGM GLRLIHYSVAIQTTDQGEVPNGYNVSRSTIEDFPLRLLSAAPSQTSVYFCASSYLGNTGE LFFGEGSRLTVLEDLKNVFPPEVAVFEPSEAEISHTQKATLVCLATGFYPDHVELSWWVN GKEVHSGVCTDPQPLKEQPALNDSRYALSSRLRVSATFWQDPRNHFRCQVQFYGLSENDE WTQDRAKPVTQIVSAEAWGRADASTKGPSVFPLAPSSKSTSGGTAALGCLVKDYFPEPVT VSWNSGALTSGVHTFPAVLQSSGLYSLSSVVTVPSSSLGTQTYICNVNHKPSNTKVDKKV LTDREWAEEWKHLDHLLNCIMDMVEKTRRSLTVLRRCQEADREELNYWIRRYSDAE |
| 86 | Quad 4 | NAGVTQTPKFQVLKTGQSMTLQCAQDMNHEYMSWYRQDPGM GLRLIHYSVAIQTTDQGEVPNGYNVSRSTIEDFPLRLLSAAPSQTSVYFCASSYLGNTGE LFFGEGSRLTVLEDLKNVFPPEVAVFEPSEAEISHTQKATLVCLATGFYPDHVELSWWVN GKEVHSGVCTDPQPLKEQPALNDSRYALSSRLRVSATFWQDPRNHFRCQVQFYGLSENDE |
| | | WTQDRAKPVTQIVSAEAWGRADASTKGPSVFPLAPSSKSTSGGTAALGCLVKDYFPEPVT VSWNSGALTSGVHTFPAVLQSSGLYSLSSVVTVPSSSLGTQTYICNVNHKPSNTKVDKKV GGGGSLTDREWAEEWKHLDHLLNCIMDMVEKTRRSLTVLRRCQEADREELNYWIRRYSDA E |
| 87 | Quad 5 | NAGVTQTPKFQVLKTGQSMTLQCAQDMNHEYMSWYRQDPGM GLRLIHYSVAIQTTDQGEVPNGYNVSRSTIEDFPLRLLSAAPSQTSVYFCASSYLGNTGE LFFGEGSRLTVLEDLKNVFPPEVAVFEPSEAEISHTQKATLVCLATGFYPDHVELSWWVN GKEVHSGVCTDPQPLKEQPALNDSRYALSSRLRVSATFWQDPRNHFRCQVQFYGLSENDE WTQDRAKPVTQIVSAEAWGRADLTDREWAEEWKHLDHLLNCIMDMVEKTRRSLTVLRRCQ EADREELNYWIRRYSDAE |
| 88 | Quad 6 | NAGVTQTPKFQVLKTGQSMTLQCAQDMNHEYMSWYRQDPGM GLRLIHYSVAIQTTDQGEVPNGYNVSRSTIEDFPLRLLSAAPSQTSVYFCASSYLGNTGE LFFGEGSRLTVLEDLKNVFPPEVAVFEPSEAEISHTQKATLVCLATGFYPDHVELSWWVN GKEVHSGVCTDPQPLKEQPALNDSRYALSSRLRVSATFWQDPRNHFRCQVQFYGLSENDE WTQDRAKPVTQIVSAEAWGRADGGGGSLTDREWAEEWKHLDHLLNCIMDMVEKTRRSLTV |
| | | LRRCQEADREELNYWIRRYSDAE |
| 89 | Quad 7 | KQEVTQIPAALSVPEGENLVLNCSFTDSAIYNLQWFRQDPG KGLTSLLLITPWQREQTSGRLNASLDKSSGRSTLYIAASQPGDSATYLCAVRPLLDGTYI PTFGRGTSLIVHPYIQNPDPAVYQLRDSKSSDKSVCLFTDFDSQTNVSQSKDSDVYITDK TVLDMRSMDFKSNSAVAWSNKSDFACANAFNNSIIPEDTFFPSPESSTVAAPSVFIFPPS DEQLKSGTASVVCLLNNFYPREAKVQWKVDNALQSGNSQESVTEQDSKDSTYSLSSTLTL SKADYEKHKVYACEVTHQGLSSPVTKSFNRGEC |
| 90 | Quad 8 | KQEVTQIPAALSVPEGENLVLNCSFTDSAIYNLQWFRQDPG KGLTSLLLITPWQREQTSGRLNASLDKSSGRSTLYIAASQPGDSATYLCAVRPLLDGTYI PTFGRGTSLIVHPYIQNPDPAVYQLRDSKSSDKSVCLFTDFDSQTNVSQSKDSDVYITDK CVLDMRSMDFKSNSAVAWSNKSDFACANAFNNSIIPEDTFFPSPESSTVAAPSVFIFPPS DEQLKSGTASVVCLLNNFYPREAKVQWKVDNALQSGNSQESVTEQDSKDSTYSLSSTLTL SKADYEKHKVYACEVTHQGLSSPVTKSFNRGEC |
| 91 | Quad 9 | KQEVTQIPAALSVPEGENLVLNCSFTDSAIYNLQWFRQDPG KGLTSLLLITPWQREQTSGRLNASLDKSSGRSTLYIAASQPGDSATYLCAVRPLLDGTYI |
| | | PTFGRGTSLIVHPYIQNPDPAVYQLRDSKSSDKSVCLFTDFDSQTNVSQSKDSDVYITDK CVLDMRSMDFKSNSAVAWSNKSDFACANAFNNSIIPEDTFFPSPESS |
| 92 | Quad 10 | NAGVTQTPKFQVLKTGQSMTLQCAQDMNHEYMSWYRQDPGM GLRLIHYSVAIQTTDQGEVPNGYNVSRSTIEDFPLRLLSAAPSQTSVYFCASSYLGNTGE LFFGEGSRLTVLEDLKNVFPPEVAVFEPSEAEISHTQKATLVCLATGFYPDHVELSWWVN GKEVHSGVSTDPQPLKEQPALNDSRYALSSRLRVSATFWQDPRNHFRCQVQFYGLSENDE WTQDRAKPVTQIVSAEAWGRADASTKGPSVFPLAPSSKSTSGGTAALGCLVKDYFPEPVT VSWNSGALTSGVHTFPAVLQSSGLYSLSSVVTVPSSSLGTQTYICNVNHKPSNTKVDKKV LTDREWAEEWKHLDHLLNCIMDMVEKTRRSLTVLRRCQEADREELNYWIRRYSDAEAPTS SSTKKTQLQLEHLLLDLQMILNGINNYKNPKLTRMLTFKFYMPKKATELKHLQCLEEELK PLEEVLNLAQSKNFHLRPRDLISNINVIVLELKGSETTFMCEYADETATIVEFLNRWITF CQSIISTLT |
| 93 | Quad 11 | NAGVTQTPKFQVLKTGQSMTLQCAQDMNHEYMSWYRQDPGM GLRLIHYSVAIQTTDQGEVPNGYNVSRSTIEDFPLRLLSAAPSQTSVYFCASSYLGNTGE LFFGEGSRLTVLEDLKNVFPPEVAVFEPSEAEISHTQKATLVCLATGFYPDHVELSWWVN |
| | | GKEVHSGVSTDPQPLKEQPALNDSRYALSSRLRVSATFWQDPRNHFRCQVQFYGLSENDE WTQDRAKPVTQIVSAEAWGRADASTKGPSVFPLAPSSKSTSGGTAALGCLVKDYFPEPVT VSWNSGALTSGVHTFPAVLQSSGLYSLSSVVTVPSSSLGTQTYICNVNHKPSNTKVDKKV GGGGSLTDREWAEEWKHLDHLLNCIMDMVEKTRRSLTVLRRCQEADREELNYWIRRYSDA EAPTSSSTKKTQLQLEHLLLDLQMILNGINNYKNPKLTRMLTFKFYMPKKATELKHLQCL EEELKPLEEVLNLAQSKNFHLRPRDLISNINVIVLELKGSETTFMCEYADETATIVEFLN RWITFCQSIISTLT |
| 94 | Quad 12 | NAGVTQTPKFQVLKTGQSMTLQCAQDMNHEYMSWYRQDPGM GLRLIHYSVAIQTTDQGEVPNGYNVSRSTIEDFPLRLLSAAPSQTSVYFCASSYLGNTGE LFFGEGSRLTVLEDLKNVFPPEVAVFEPSEAEISHTQKATLVCLATGFYPDHVELSWWVN GKEVHSGVSTDPQPLKEQPALNDSRYALSSRLRVSATFWQDPRNHFRCQVQFYGLSENDE WTQDRAKPVTQIVSAEAWGRADASTKGPSVFPLAPSSKSTSGGTAALGCLVKDYFPEPVT VSWNSGALTSGVHTFPAVLQSSGLYSLSSVVTVPSSSLGTQTYICNVNHKPSNTKVDKKV EPKSCDKTHTCPPCPLTDREWAEEWKHLDHLLNCIMDMVEKTRRSLTVLRRCQEADREEL NYWIRRYSDAE |
| 95 | Quad 13 | NAGVTQTPKFQVLKTGQSMTLQCAQDMNHEYMSWYRQDPGM GLRLIHYSVAIQTTDQGEVPNGYNVSRSTIEDFPLRLLSAAPSQTSVYFCASSYLGNTGE LFFGEGSRLTVLEDLKNVFPPEVAVFEPSEAEISHTQKATLVCLATGFYPDHVELSWWVN GKEVHSGVSTDPQPLKEQPALNDSRYALSSRLRVSATFWQDPRNHFRCQVQFYGLSENDE WTQDRAKPVTQIVSAEAWGRADASTKGPSVFPLAPSSKSTSGGTAALGCLVKDYFPEPVT VSWNSGALTSGVHTFPAVLQSSGLYSLSSVVTVPSSSLGTQTYICNVNHKPSNTKVDKKV EPKSCDKTHTCPPCPGGGGSLTDREWAEEWKHLDHLLNCIMDMVEKTRRSLTVLRRCQEA DREELNYWIRRYSDAE |
| 96 | Quad 14 | QVQLVESGGALVQPGGSLRLSCAASGFPVNRYSMRWYRQAP GKEREWVAGMSSAGDRSSYEDSVKGRFTISRDDARNTVYLQMNSLKPEDTAVYYCNVNVG FEYWGQGTQVTVSSKLTDREWAEEWKHLDHLLNCIMDMVEKTRRSLTVLRRCQEADREEL NYWIRRYSDAE |
| 97 | Quad 15 | QVQLVESGGALVQPGGSLRLSCAASGFPVNRYSMRWYRQAP GKEREWVAGMSSAGDRSSYEDSVKGRFTISRDDARNTVYLQMNSLKPEDTAVYYCNVNVG |
| | | FEYWGQGTQVTVSSKGGGGSLTDREWAEEWKHLDHLLNCIMDMVEKTRRSLTVLRRCQEA DREELNYWIRRYSDAE |
| 98 | Quad 18 | QVQLVESGGALVQPGGSLRLSCAASGFPVNRYSMRWYRQAP GKEREWVAGMSSAGDRSSYEDSVKGRFTISRDDARNTVYLQMNSLKPEDTAVYYCNVNVG FEYWGQGTQVTVSSKLTDREWAEEWKHLDHLLNCIMDMVEKTRRSLTVLRRCQEADREEL NYWIRRYSDAEAPTSSSTKKTQLQLEHLLLDLQMILNGINNYKNPKLTRMLTFKFYMPKK ATELKHLQCLEEELKPLEEVLNLAQSKNFHLRPRDLISNINVIVLELKGSETTFMCEYAD ETATIVEFLNRWITFCQSIISTLT |
| 99 | Quad 19 | QVQLVESGGALVQPGGSLRLSCAASGFPVNRYSMRWYRQAP GKEREWVAGMSSAGDRSSYEDSVKGRFTISRDDARNTVYLQMNSLKPEDTAVYYCNVNVG FEYWGQGTQVTVSSKGGGGSLTDREWAEEWKHLDHLLNCIMDMVEKTRRSLTVLRRCQEA DREELNYWIRRYSDAEAPTSSSTKKTQLQLEHLLLDLQMILNGINNYKNPKLTRMLTFKF YMPKKATELKHLQCLEEELKPLEEVLNLAQSKNFHLRPRDLISNINVIVLELKGSETTFM CEYADETATIVEFLNRWITFCQSIISTLT |
| 100 | Quad 20 | KQEVTQIPAALSVPEGENLVLNCSFTDSAIYNLQWFRQDPG |
| | | KGLTSLLLITPWQREQTSGRLNASLDKSSGRSTLYIAASQPGDSATYLCAVRPLLDGTYI PTFGRGTSLIVHPYIQNPDPAVYQLRDSKSSDKSVCLFTDFDSQTNVSQSKDSDVYITDK TVLDMRSMDFKSNSAVAWSNKSDFACANAFNNSIIPEDTFFPSPESSASTKGPSVFPLAP SSKSTSGGTAALGCLVKDYFPEPVTVSWNSGALTSGVHTFPAVLQSSGLYSLSSVVTVPS SSLGTQTYICNVNHKPSNTKVDKKVLHGTRQEEMIDHRLTDREWAEEWKHLDHLLNCIMD MVEKTRRSLTVLRRCQEADREELNYWIRRYSDAEDLK |
| 101 | Quad 21 | KQEVTQIPAALSVPEGENLVLNCSFTDSAIYNLQWFRQDPG KGLTSLLLITPWQREQTSGRLNASLDKSSGRSTLYIAASQPGDSATYLCAVRPLLDGTYI PTFGRGTSLIVHPYIQNPDPAVYQLRDSKSSDKSVCLFTDFDSQTNVSQSKDSDVYITDK TVLDMRSMDFKSNSAVAWSNKSDFACANAFNNSIIPEDTFFPSPESSASTKGPSVFPLAP SSKSTSGGTAALGCLVKDYFPEPVTVSWNSGALTSGVHTFPAVLQSSGLYSLSSVVTVPS SSLGTQTYICNVNHKPSNTKVDKKVGGGGSLHGTRQEEMIDHRLTDREWAEEWKHLDHLL NCIMDMVEKTRRSLTVLRRCQEADREELNYWIRRYSDAEDLK |
| 102 | Quad 22 | NAGVTQTPKFQVLKTGQSMTLQCAQDMNHEYMSWYRQDPGM |
| | | GLRLIHYSVAIQTTDQGEVPNGYNVSRSTIEDFPLRLLSAAPSQTSVYFCASSYLGNTGE LFFGEGSRLTVLEDLKNVFPPEVAVFEPSEAEISHTQKATLVCLATGFYPDHVELSWWVN GKEVHSGVSTDPQPLKEQPALNDSRYALSSRLRVSATFWQDPRNHFRCQVQFYGLSENDE WTQDRAKPVTQIVSAEAWGRADTVAAPSVFIFPPSDEQLKSGTASWCLLNNFYPREAKV QWKVDNALQSGNSQESVTEQDSKDSTYSLSSTLTLSKADYEKHKVYACEVTHQGLSSPVT KSFNRGEC |
| 103 | Quad 28 | EVQLVESGGGLVQPGRSLRLSCAASGFTFDDYAMHWVRQAP GKGLEWVSAITWNSGHIDYADSVEGRFTISRDNAKNSLYLQMNSLRAEDTAVYYCAKVSY LSTASSLDYWGQGTLVTVSSASTKGPSVFPLAPSSKSTSGGTAALGCLVKDYFPEPVTVS WNSGALTSGVHTFPAVLQSSGLYSLSSWTVPSSSLGTQTYICNVNHKPSNTKVDKKVLH GTRQEEMIDHRLTDREWAEEWKHLDHLLNCIMDMVEKTRRSLTVLRRCQEADREELNYWI RRYSDAEDLK |
| 104 | Quad 29 | EVQLVESGGGLVQPGRSLRLSCAASGFTFDDYAMHWVRQAP GKGLEWVSAITWNSGHIDYADSVEGRFTISRDNAKNSLYLQMNSLRAEDTAVYYCAKVSY LSTASSLDYWGQGTLVTVSSASTKGPSVFPLAPSSKSTSGGTAALGCLVKDYFPEPVTVS |
| | | WNSGALTSGVHTFPAVLQSSGLYSLSSWTVPSSSLGTQTYICNVNHKPSNTKVDKKVGG GGSLHGTRQEEMIDHRLTDREWAEEWKHLDHLLNCIMDMVEKTRRSLTVLRRCQEADREE LNYWIRRYSDAEDLK |
| 105 | Quad 30 | DIQMTQSPSSLSASVGDRVTITCRASQGIRNYLAWYQQ KPGKAPKLLIYAASTLQSGVPSRFSGSGSGTDFTLTISSLQPEDVATYYCQRYNRAPYTF GQGTKVEIKRTVAAPSVFIFPPSDEQLKSGTASVVCLLNNFYPREAKVQWKVDNALQSGN SQESVTEQDSKDSTYSLSSTLTLSKADYEKHKVYACEVTHQGLSSPVTKSFNRGEC |
| 106 | Quad 31 | EVQLVESGGGLVQPGGSLRLSCAASGYTFTNYGMNWVRQAP GKGLEWVGWINTYTGEPTYAADFKRRFTFSLDTSKSTAYLQMNSLRAEDTAVYYCAKYPH YYGSSHWYFDVWGQGTLVTVSSASTKGPSVFPLAPSSKSTSGGTAALGCLVKDYFPEPVT VSWNSGALTSGVHTFPAVLQSSGLYSLSSVVTVPSSSLGTQTYICNVNHKPSNTKVDKKV LHGTRQEEMIDHRLTDREWAEEWKHLDHLLNCIMDMVEKTRRSLTVLRRCQEADREELNY WIRRYSDAEDLK |
| 107 | Quad 32 | EVQLVESGGGLVQPGGSLRLSCAASGYTFTNYGMNWVRQAP GKGLEWVGWINTYTGEPTYAADFKRRFTFSLDTSKSTAYLQMNSLRAEDTAVYYCAKYPH |
| | | YYGSSHWYFDVWGQGTLVTVSSASTKGPSVFPLAPSSKSTSGGTAALGCLVKDYFPEPVT VSWNSGALTSGVHTFPAVLQSSGLYSLSSVVTVPSSSLGTQTYICNVNHKPSNTKVDKKV GGGGSLHGTRQEEMIDHRLTDREWAEEWKHLDHLLNCIMDMVEKTRRSLTVLRRCQEADR EELNYWIRRYSDAEDLK |
| 108 | Quad 33 | DIQMTQSPSSLSASVGDRVTITCSASQDISNYLNWYQQ KPGKAPKVLIYFTSSLHSGVPSRFSGSGSGTDFTLTISSLQPEDFATYYCQQYSTVPWTF GQGTKVEIKRTVAAPSVFIFPPSDEQLKSGTASVVCLLNNFYPREAKVQWKVDNALQSGN SQESVTEQDSKDSTYSLSSTLTLSKADYEKHKVYACEVTHQGLSSPVTKSFNRGEC |
| 109 | Quad 34 | DIQMTQSPSSLSASVGDRVTITCRASQSIDSYLHWYQQK PGKAPKLLIYSASELQSGVPSRFSGSGSGTDFTLTISSLQPEDFATYYCQQVVWRPFTFG QGTKVEIKRGGGGSLHGTRQEEMIDHRLTDREWAEEWKHLDHLLNCIMDMVEKTRRSLTV LRRCQEADREELNYWIRRYSDAEDLK |
| 110 | Quad 36 | EVQLLESGGGLVQPGGSLRLSCAASGFTFAHETMVWVRQAPG KGLEWVSHIPPDGQDPFYADSVKGRFTISRDNSKNTLYLQMNSLRAEDTAVYHCALLPKR GPWFDYWGQGTLVTVSSGGGGSLHGTRQEEMIDHRLTDREWAEEWKHLDHLLNCIMDMVE |
| | | KTRRSLTVLRRCQEADREELNYWIRRYSDAEDLK |
| 111 | Quad 38 | DIQMTQSPSSLSASVGDRVTITCRASQWIGPELSWYQQK PGKAPKLLIYHTSILQSGVPSRFSGSGSGTDFTLTISSLQPEDFATYYCQQYMFQPRTFG QGTKVEIRGGGGSLHGTRQEEMIDHRLTDREWAEEWKHLDHLLNCIMDMVEKTRRSLTVL RRCQEADREELNYWIRRYSDAEDLK |
| 112 | Quad 40 | DIQMTQSPTSLSASVGDRVTITCRASQWIGNLLDWYQQK PGEAPKLLIYYASFLQSGVPSRFSGGGFGTDFTLTISSLQPEDFATYYCQQANPAPLTFG QGTKVEIKRGGGGSLHGTRQEEMIDHRLTDREWAEEWKHLDHLLNCIMDMVEKTRRSLTV LRRCQEADREELNYWIRRYSDAEDLK |
| 113 | Quad 42 | DIQMTQSPSSLSASVGDRVTITCRASQWIGPELSWYQQK PGKAPKLLIYHTSILQSGVPSRFSGSGSGTDFTLTISSLQPEDFATYYCQQYMFQPRTFG QGTKVEIRGGGGSLHGTRQEEMIDHRLTDREWAEEWKHLDHLLNCIMDMVEKTRRSLTVL RRCQEADREELNYWIRRYSDAEDLKGGGGSDIQMTQSPTSLSASVGDRVTITCRASQWIG NLLDWYQQKPGEAPKLLIYYASFLQSGVPSRFSGGGFGTDFTLTISSLQPEDFATYYCQQ ANPAPLTFGQGTKVEIKR |
| 114 | Quad 44 | DIQMTQSPSSLSASVGDRVTITCRASQNIDSRLSWYQQK PGKAPKLLIYRTSVLQSGVPSRFSGSGSGTDFTLTISSLQPEDFATYYCQQWDMFPLTFG QGTKVEIKRGGGGSLHGTRQEEMIDHRLTDREWAEEWKHLDHLLNCIMDMVEKTRRSLTV LRRCQEADREELNYWIRRYSDAEDLK |
| 115 | Quad 46 | DIQMTQSPSSLSASVGDRVTITCRASQNIDSRLSWYQQK PGKAPKLLIYRTSVLQSGVPSRFSGSGSGTDFTLTISSLQPEDFATYYCQQWDMFPLTFG QGTKVEIKRGGGGSLHGTRQEEMIDHRLTDREWAEEWKHLDHLLNCIMDMVEKTRRSLTV LRRCQEADREELNYWIRRYSDAEDLKGGGGSDIQMTQSPSSLSASVGDRVTITCRASQDI GDRLRWYQQKPGKAPKLLIYHGSRLESGVPSRFSGSRSGTDFTLTISSLQPEDFATYYCQ QQWFRPYTFGQGTKVEIKR |

TABLE 6

DNA and amino acid sequences of NHR2 TDs

| SEQ ID NO: | NHR2 TD | DNA SEQUENCE |
|---|---|---|
| 116 | NHR2 TD | CTAACAGACAGAGAATGGGCAGAAGAGTGGAAACATCTTGACCATCTGTTAAACTGCATA ATGGACATGGTAGAAAAAACAAGGCGATCTCTCACCGTACTAAGGCGGTGTCAAGAAGCA GACCGGGAAGAATTGAATTACTGGATCCGGCGGTACAGTGACGCCGAG |
| 117 | NHR2^{∗} TD | TTGCATGGCACACGTCAAGAAGAAATGATTGATCACAGACTAACAGACAGAGAATGGGCA GAAGAGTGGAAACATCTTGACCATCTGTTAAACTGCATAATGGACATGGTAGAAAAAACA AGGCGATCTCTCACCGTACTAAGGCGGTGTCAAGAAGCAGACCGGGAAGAATTGAATTAC TGGATCCGGCGGTACAGTGACGCCGAG |
| 118 | NHR2^{∗∗} TD | GGCACACGTCAAGAAGAAATGATTGATCACAGACTAACAGACAGAGAATGGGCAGAAGAG TGGAAACATCTTGACCATCTGTTAAACTGCATAATGGACATGGTAGAAAAAACAAGGCGA TCTCTCACCGTACTAAGGCGGTGTCAAGAAGCAGACCGGGAAGAATTGAATTACTGGATC CGGCGGTACAGTGACGCCGAG |
| 119 | NHR2^{∗∗∗} TD | CAAGAAGAAATGATTGATCACAGACTAACAGACAGAGAATGGGCAGAAGAGTGGAAACAT CTTGACCATCTGTTAAACTGCATAATGGACATGGTAGAAAAAACAAGGCGATCTCTCACC GTACTAAGGCGGTGTCAAGAA |
| | NHR2 TD | AMINO ACID SEQUENCE |
| 120 | NHR2 TD | LTDREWAEEWKHLDHLLNCIMDMVEKTRRSLTVLRRCQEADREELNYWIRRYSDAE |
| 121 | NHR2^{∗} TD | LHGTRQEEMIDHRLTDREWAEEWKHLDHLLNCIMDMVEKTRRSLTVLRRCQEADREELNY WIRRYSDAEDLK |
| 122 | NHR2^{∗∗} TD | GTRQEEMIDHRLTDREWAEEWKHLDHLLNCIMDMVEKTRRSLTVLRRCQEADREELNYWI RRYSDAE |
| 123 | NHR2^{∗∗∗} TD | QEEMIDHRLTDREWAEEWKHLDHLLNCIMDMVEKTRRSLTVLRRCQE |

NHR2^{∗} TD and NHR2^{∗∗∗} TD include additional amino acid residues at the N- and/or C-terminus. NHR2^{∗∗∗} only includes amino acid residues of the annotated NHR2 domain according to Pubmed (Reference: UniProtKB - Q06455 (MTG8_HUMAN)

TABLE 7

Human p53 TD sequences

| SEQ ID NO: | p53 TD | DNA SEQUENCE |
|---|---|---|
| 124 | p53 TD | AAGAAGAAACCACTGGATGGAGAATATTTCACCCTTCAGATCCGTGGGCGTGAGCGCTTCGAG ATGTTCCGAGAGCTGAATGAGGCCTTGGAACTCAAGGATGCCCAGGCTGGGAAGGAGCCAGG G |
| 125 | p53^{∗} TD | GGAGAATATTTCACCCTTCAGATCCGTGGGCGTGAGCGCTTCGAGATGTTCCGAGAGCTGAAT GAGGCCTTGGAACTCAAGGATGCCCAGGCTGGG |
| SEQ ID NO: | p53 TD | AMINO ACID SEQUENCE |
| 126 | p53 TD | KKKPLDGEYFTLQIRGRERFEMFRELNEALELKDAQAGKEPG |
| 10 | p53^{∗} TD | GEYFTLQIRGRERFEMFRELNEALELKDAQAG |

p53^{∗} TD is a truncated version of p53 TD

[2542] Table 8: Description of monomeric building block of Quad Formats A - AC and as outlined in FIG. 49

[2543] In the schematics, components of polypeptide chains are N- to C-terminally from top to the bottom of each chain as shown.

[2544] Herein the terms “SAM”, “self-associating multimerization domain” and “multimerisation domain” are used interchangeably. A SAM may, for example be called a TD herein. A TD may be a tetradimerisation domain as disclosed herein, eg, a p53, p63, p73 or NHR2 domain or homologue or orthologue thereof.

[2545] Valency indicates binding site number in the tetramer form when using a TD as a SAM.

| Quad Format (See FIG. 49 ) | Description |
|---|---|
| A | Tetravalent dAb Quad |
| | Monomeric building block of Quad format ‘A’ contains self-assembling multimerisation (SAM) domain linked to a dAb (an antibody single variable domain). The dAb can be linked at either the N- or C-terminus of the SAM domain via an optional peptide linker. The dAb binding domain can either be a VH, Vκ or Vλ. |
| B | Octavalent Monospecific dAb Quad |
| | Monomeric building block of Quad format ‘B’ contains SAM domain linked to dAb binding domains at both N- and C-terminus via optional peptide linkers 1 and/or 2. dAb binding domains can either be a VH, Vκ or Vλ. The dAbs have the same antigen specificity. |
| C | Octavalent Bispecific dAb Quad |
| | Monomeric building block of Quad format ‘C’ contains SAM domain linked to two different dAb binding domains (dAb A and dAb B) at the N- and C-terminus via optional peptide linkers 1 and/or 2. The dAb binding domains can either be a VH, Vκ or Vλ. dAb A has an antigen specificity that is different from the antigen specificity of dAbB. |
| D | Tetravalent Monospecific scFv Quad |
| | Monomeric building block of Quad format ‘D’ contains SAM domain linked to an scFv binding domain. The scFv binding domain can be linked at either the N- or C-terminus of the SAM domain via an optional peptide linker. |
| E | Octavalent Monospecific scFv Quad |
| | Monomeric building block of Quad format ‘E’ contains SAM domain linked to the same type of scFv binding domains at both N- and C-terminus via optional peptide linkers 1 and/or 2. |
| F | Octavalent Bispecific scFv Quad |
| | Monomeric building block of Quad format ‘F’ contains SAM domain linked to two different scFv binding domains (scFv A and scFv B) at the N- and C-terminus via optional peptide linkers 1 and/or 2. scFv A has an antigen specificity that is different from the antigen specificity of scFv B. |
| G | Octavalent Bispecific scFv x dAb Quad |
| | Monomeric building block of Quad format ‘G’ contains SAM domain linked to two different binding domain formats (i.e. scFv and a dAb). The scFv and dAb binding domains can be fused to SAM domain via the N- and C-terminus, respectively or via C-and N-terminus, respectively. Both scFv and dAb binding domains are fused to SAM domain via optional peptide linkers 1 and/or 2. |
| H | Tetravalent Monospecific Ig-dAb Quad v1 |
| | Monomeric building block of Quad format ‘H’ contains SAM domain linked to Ig Fc region (eg, an IgG1 Fc region) comprising of CH3 and CH2 (eg, CH2′) domains in addition to a dAb. dAb binding domain can be linked to N- or C-terminus of the Fc region via an optional peptide linker 1 or 2, respectively. Similarly SAM domain can be linked to N- or C-terminus of the Fc region via an optional peptide linker 1 or 2, respectively. CH2′ domain is devoid of core hinge region. The dAb binding domain can either be a VH, Vκ or Vλ. “Monomeric Ig” indicates that the Fc (such as comprising a CH2′) does not directly pair with another Fc. |
| I | Tetravalent Monospecific Ig-scFv Quad v1 |
| | Monomeric building block of Quad format′I′ contains SAM domain linked to Ig Fc region consisting of CH3 and CH2 (eg, CH2′) domains in addition to a scFv binding domain. scFv binding domain can be linked to N- or C-terminus of the Fc region via an optional peptide linker 1 or 2, respectively. Similarly SAM domain can be linked to Nor C-terminus of the Fc region via an optional peptide linker 1 or 2, respectively. CH2′ domain is devoid of core hinge region or a CXXC core region motif. |
| J | Tetravalent Monospecific Ig-Fab Quad v1 |
| | Monomeric building block of Quad format ‘J’ comprises or consists of two chains. The chain containing SAM domain is linked to Ig Fc region comprising CH3 and CH2 (eg, CH2′) domains in addition to Ig Fab connected via the CH1 domain. Ig Fab is linked to the N-terminus of the Fc region via an optional peptide linker 1. The SAM domain is linked to C-terminus of the Fc region via an optional peptide linker 2. CH2′ domain is devoid of core hinge region. The second chain is an Ig light chain comprising of CL and VL domains. |
| K | Tetravalent Monospecific Ig-Fab Quad v2 |
| | Monomeric building block of Quad format ‘K’ comprises or consists of two chains. The chain containing SAM domain is linked to Ig Fc region comprising CH3 and CH2 (eg, CH2′) domains in addition to Ig Fab connected via the CL domain. Ig Fab is linked to the N-terminus of the Fc region via an optional peptide linker 1. The SAM domain is linked to C-terminus of the Fc region via an optional peptide linker 2. CH2′ domain is devoid of core hinge region. The second chain is an Ig heavy chain comprising CH1 and VH domains. |
| L | Tetravalent Monospecific Ig-dAb Quad v2 |
| | Monomeric building block of Quad format ‘L’ contains SAM domain linked to Ig Fc region consisting of CH3 and CH2 (eg, CH2′) domains in addition to a dAb antigen binding domain. dAb is linked to the SAM domain with an optional peptide linker 1. The Fc region is linked to the SAM domain via the C-terminus with an optional linker 2. CH2′ domain is devoid of core hinge region. The dAb can either be a VH, Vκ or Vλ. |
| M | Tetravalent Monospecific Ig-scFv Quad v2 |
| | Monomeric building block of Quad format ‘M’ contains SAM domain linked to Ig Fc region consisting of CH3 and CH2 (eg, CH2′) domains in addition to a scFv antigen binding domain. scFv is linked to the SAM domain via the N-terminus with an optional peptide linker 1. The Fc region is linked to the SAM domain via the C-terminus with an optional linker 2. CH2′ domain is devoid of core hinge region. |
| N | Tetravalent Monospecific Ig-Fab Quad v3 |
| | Monomeric building block of Quad format ‘N’ comprises or consists of two chains. The chain containing SAM domain is linked to Ig Fc region comprising CH3 and CH2 (eg, CH2′) domains in addition to Ig Fab connected via the CH1 domain. The Ig Fab is linked to SAM domain via the N-terminus with an optional peptide linker 1. The Ig Fc region is linked to SAM domain via the C-terminus with an optional peptide linker 2. The second chain is an Ig light chain consisting of CL and VL domains. |
| O | Tetravalent Monospecific Ig-Fab Quad v4 |
| | Monomeric building block of Quad format ‘O’ comprises or consists of two chains. The chain containing SAM domain is linked to Ig Fc region consisting of CH3 and CH2 (eg, CH2′) domains in addition to Ig Fab connected via the CL domain. The Ig Fab is linked to SAM domain via the N-terminus with an optional peptide linker 1. The Ig Fc region is linked to SAM domain via the C-terminus with an optional peptide linker 2. The second chain is an Ig heavy chain consisting of CH1 and VH domains. |
| P | Octavalent Bispecific Tandem dAb Quad |
| | Monomeric building block of Quad format ‘P’ contains SAM domain linked to two different dAbs (dAb A and dAb B) connected in tandem. The dAbs are connected together via an optional peptide linker 1 and the tandem dAbs are connected to SAM domain at either the N- or C-terminus via an optional peptide linker 2. dAb binding domains can either be a VH, Vκ or Vλ,. |
| Q | Tetravalent Fab Quad v1 |
| | Monomeric building block of Quad format ‘Q’ comprises or consists of two chains. The chain containing SAM domain is linked to Ig Fab via CH1 domain. Ig Fab is linked to the N-terminus of the SAM domain via an optional peptide linker. The second chain is an Ig light chain comprising CL and VL domains. |
| R | Tetravalent Fab Quad v2 |
| | Monomeric building block of Quad format ‘R’ comprises or consists of two chains. The chain containing SAM domain is linked to Ig Fab via CL domain. Ig Fab is linked to the N-terminus of the SAM domain via an optional peptide linker. The second chain is an Ig heavy chain comprising of CH1 and VH domains. |
| S | Octavalent Bispecific Fab x dAb Quad |
| | Monomeric building block of Quad format ‘S’ comprises or consists of two chains. The chain containing SAM domain is linked to different binding domains. Binding domain ‘A’ is a Fab linked to SAM domain at the N-terminus via an optional peptide linker 1. Binding domain ‘B’ is a dAb linked to the SAM domain at the C-terminus via an optional linker 2. The dAb binding domain can either be a VH, Vκ or Vλ. The second chain is an Ig light chain comprising CL and VL domains. The Fab binding domain ‘A’ could also be optionally linked via the CL of the light chain. |
| T | 12-Valent Trispecific dAb Quad |
| | Monomeric building block of Quad format’T′ contains SAM domain linked to three different dAbs (dAbs A, B & C) with specificity for either three different epitopes of the same target protein or a respective epitope on three different target proteins. The tandem dAbs ‘A’ & ‘B’ is linked to the SAM domain at the N-terminus via an optional linker 1 where dAbs ‘A’ & ‘B’ are linked together via an optional linker 2. A single dAb (dAb ‘C’) is linked at the C-terminus of the SAM domain via an optional linker 3. The dAb binding domains can either be a VH, Vκ or Vλ. In an alternative, the configuration (in N- to C-terminal direction) is dAb A - optional linker 1 - SAM optional linker 2 - dAb B - optional linker 3 - dAb C. |
| U | 12-Valent Trispecific dAb x scFv Quad |
| | Monomeric building block of Quad format ‘U’ contains SAM domain linked to three different binding domains (Tandem dAb containing dAbs A & B and an scFv ‘C’) with specificity for either three different epitopes of the same target protein or a respective epitope on three different target proteins. The tandem dAbs ‘A’ & ‘B’ is linked to the SAM domain at the N-terminus via an optional linker 1 where dAbs ‘A’ & ‘B’ are linked together via an optional linker 2. An scFv ‘C’ is linked at the C-terminus of the SAM domain via an optional linker 3. The dAb binding domains can either be a VH, Vκ or Vλ. In an alternative, the configuration (in N- to C-terminal direction) is (i) dAb A - optional linker 1 - SAM optional linker 2 - dAb B - optional linker 3 - scFv C; (ii) scFv- optional linker 1 - SAM optional linker 2 - dAb A - optional linker 3 - dAb B; or (iii) scFv- optional linker 1 - dAb A -optional linker 2 - SAM - optional linker 3 - dAb B. |
| V | 16-Valent Tetraspecific dAb Quad |
| | Monomeric building block of Quad format ‘V’ contains SAM domain linked to two tandem |
| | dAbs (consisting of dAbs A-D) with specificity for either four different epitopes of the same target protein or a respective epitope on four different target proteins. Each tandem dAb comprises two different dAbs linked together via one or more optional peptide linkers (Linker 1 and 4). The two tandem dAbs are linked to the SAM domain via the N- and C-terminus via optional peptide linkers 2 and 3 respectively. The dAb binding domains can either be a VH, Vκ or Vλ. In an alternative, all dAbs are the same and have the same epitope specificity. |
| W | Octavalent Bispecific Monomeric Ig-dAb Quad |
| | Monomeric building block of Quad format ‘W’ contains SAM domain linked to Ig Fc region comprising or consisting of CH3 and (CH2 (eg, CH2′) domains plus two different dAb binding domains. The Ig Fc region is linked to the SAM domain at the N-terminus via an optional peptide linker 2. The first dAb binding domain ‘A’ is linked to the Ig Fc region at the N-terminus via an optional peptide linker 1. The second dAb binding domain ‘B’ is linked to the SAM domain at the C-terminus via an optional peptide linker 3. The CH2′ domain is devoid of core hinge region. The dAb binding domains can either be a VH, Vκ or Vλ. In an alternative, the dAbs have the same antigen binding specificity. |
| X | Octavalent Bispecific Monomeric Ig-dAb x scFv Quad |
| | Monomeric building block of Quad format ‘X’ contains SAM domain linked to Ig Fc region comprising or consisting ofcCH3 and CH2 (eg, CH2′) domains plus two different binding domains. The Ig Fc region is linked to the SAM domain at the N-terminus via an optional peptide linker 2. The first binding domain (dAb A′) is linked to the Ig Fc region at the N-terminus via an optional peptide linker 1. The second binding domain (scFv ‘B’) is linked to the SAM domain at the C-terminus via an optional peptide linker 3. The CH2′ domain is devoid of core hinge region. The dAb binding domain can either be a VH, Vκ or Vλ. In an alternative, the dAb and scFv have the same antigen binding specificity. |
| Y | Octavalent Bispecific Monomeric Ig-Tandem dAb Quad |
| | Monomeric building block of Quad format ‘Y’ contains SAM domain linked to Ig Fc region comprising or consisting of CH3 and CH2 (eg, CH2′) domains plus a tandem dAb containing dAbs ‘A’ & ‘B’ linked together via an optional peptide linker 1. The Ig Fc region is linked to the SAM domain at the N-terminus via an optional peptide linker 3. The tandem dAb is linked to the Ig Fc region at the N-terminus via an optional peptide linker 2. The CH2′ domain is devoid |
| | of core hinge region. The dAb binding domains can either be a VH, Vκ or Vλ. In an alternative, the dAbs have the same antigen binding specificity. |
| Z | 12-Valent Trispecific Monomeric Ig-dAb Quad |
| | Monomeric building block of Quad format ‘Z’ contains SAM domain linked to Ig Fc region comprising or consisting of CH3 and CH2 (eg, CH2′) domains plus a tandem dAb containing dAbs ‘A’ & ‘B’ linked together via an optional peptide linker 1 and a single dAb binding domain ‘C’. The Ig Fc region is linked to the SAM domain at the N-terminus via an optional peptide linker 3. The tandem dAb is linked to the Ig Fc region at the N-terminus via an optional peptide linker 2. The dAb binding domain ‘C’ is linked to the SAM domain at the C-terminus via an optional peptide linker 4. The CH2′ domain is devoid of core hinge region. The dAb binding domains can either be a VH, Vκ or Vλ. In an alternative, the dAbs have the same antigen binding specificity. |
| AA | 12-Valent Trispecific Monomeric Ig-dAb x scFv Quad |
| | Monomeric building block of Quad format ‘AA’ contains SAM domain linked to Ig Fc region comprising or consisting of CH3 and CH2′ domains plus a tandem dAb containing dAbs ‘A’ & ‘B’ linked together via an optional peptide linker 1 and a scFv containing binding domain ‘C’. The Ig Fc region is linked to the SAM domain at the N-terminus via an optional peptide linker 3. The tandem dAb is linked to the Ig Fc region at the N-terminus via an optional peptide linker 2. The scFv binding domain ‘C’ is linked to the SAM domain at the C-terminus via an optional peptide linker 4. The CH2′ domain is devoid of core hinge region. The dAb binding domains can either be a VH, Vκ or Vλ. In an alternative, the dAbs and scFv have the same antigen binding specificity. |
| AB | 16-Valent Bispecific Monomeric Ig-Tandem dAb Quad |
| | Monomeric building block of Quad format ‘AB’ contains SAM domain linked to Ig Fc region comprising or consisting of CH3 and CH2 (eg, CH2′) domains plus two identical tandem |
| | dAbs containing dAbs ‘A’ & ‘B’ linked together via optional peptide linkers 1 and 5, respectively. The Ig Fc region is linked to the SAM domain at the N-terminus via an optional peptide linker 3. The first tandem dAb is linked to the Ig Fc region at the N-terminus via an optional peptide linker 2. The second tandem dAb is linked to the SAM domain at the C-terminus via an optional peptide linker 4. The CH2′ domain is devoid of core hinge region. The dAb binding domains can either be a VH, Vκ or Vλ. In an alternative, the dAbs have the same antigen binding specificity. |
| AC | 16-Valent Tetraspecific Monomeric Ig-Tandem dAb Quad |
| | Monomeric building block of Quad format ‘AC’ contains SAM domain linked to Ig Fc region comprising or consisting of CH3 and CH2 (eg, CH2′) domains plus two different tandem dAbs containing dAbs ‘A’ & ‘B’ and dAbs ‘C’ & ‘D’ linked together via optional peptide linkers 1 and 5 respectively. The Ig Fc region is linked to the SAM domain at the N-terminus via an optional peptide linker 3. The first tandem dAb containing dAbs ‘A’ & ‘B’ is linked to the Ig Fc region at the N-terminus via an optional peptide linker 2. The second tandem dAb containing dAbs ‘C’ & ‘D’ is linked to the SAM domain at the C-terminus via an optional peptide linker 4. The CH2′ domain is devoid of core hinge region. The dAb binding domains can either be a VH, Vκ or Vλ. In an alternative, the dAbs AB or CD or AC or AD or BC or BD have the same antigen binding specificity. For example AD have a first antigen specificity and BC have a second antigen specificity. For example AB have a first antigen specificity and CD have a second antigen specificity |

TABLE 9

DNA sequences encoding Quad polypeptides

| | | |
|---|---|---|
| SEQ ID NO. | QUAD NO. | NUCLEOTIDE SEQUENCE |
| 139 | Quad 51 | ATGGGATGGTCTTGTATAATTCTGTTCCTGGTGGCAACAGCAA CAGGAGTGCATAGCGAGGTGCAGCTGGTGGAGTCTGGGGGA GGCTTGGTACAGCCCGGCAGGTCCCTGAGACTCTCCTGTGCGG CCTCTGGATTCACCTTTGATGATTATGCCATGCACTGGGTCCGG CAAGCTCCAGGGAAGGGCCTGGAATGGGTCTCAGCTATCACTT GGAATAGTGGTCACATAGACTATGCGGACTCTGTGGAGGGCC GATTCACCATCTCCAGAGACAACGCCAAGAACTCCCTGTATCTG CAAATGAACAGTCTGAGAGCTGAGGATACGGCCGTATATTACT GTGCGAAAGTCTCGTACCTTAGCACCGCGTCCTCCCTTGACTAT TGGGGCCAAGGTACCCTGGTCACCGTCTCGAGTGGCGGCGGA GGCAGCGGAGGCGGAGGTTCTGGAGGAGGGGGGAGTGACAT CCAGATGACCCAGTCTCCATCCTCCCTGTCTGCATCTGTAGGGG ACAGAGTCACCATCACTTGTCGGGCAAGTCAGGGCATCAGAAA TTACTTAGCCTGGTATCAGCAAAAACCAGGGAAAGCCCCTAAG CTCCTGATCTATGCTGCATCCACTTTGCAATCAGGGGTCCCATC TCGGTTCAGTGGCAGTGGATCTGGGACAGATTTCACTCTCACC ATCAGCAGCCTACAGCCTGAAGATGTTGCAACTTATTACTGTCA AAGGTATAACCGTGCACCGTATACTTTTGGCCAGGGGACCAAG GTGGAAATCAAAAAGAAGAAACCACTGGATGGAGAATATTTC ACCCTTCAGATCCGTGGGCGTGAGCGCTTCGAGATGTTCCGAG AGCTGAATGAGGCCTTGGAACTCAAGGATGCCCAGGCTGGGA AGGAGCCAGGG |
| 140 | Quad 53 Mon | ATGGGCTGGTCCTGCATCATCCTGTTTCTGGTGGCCACAGCCA CAGGCGTGCACAGCGATATTGTGCTGACACAGAGCCCCGCCAT CCTGAGTGCTTCTCCAGGCGAGAAAGTGACCATGACCTGCAGA GCCAGCAGCAGCGTGAACTACATGGACTGGTATCAGAAGAAG CCCGGCAGCAGCCCCAAGCCTTGGATCTACGCCACAAGCAATC TGGCCAGCGGAGTGCCTGCCAGATTTTCTGGCTCTGGCAGCGG CACAAGCTACAGCCTGACAATCAGCAGAGTGGAAGCCGAGGA TGCCGCCACCTACTACTGTCAGCAGTGGTCCTTCAATCCTCCTA |
| | | CCTTCGGCGGAGGCACCAAGCTGGAAATCAAGGGCTCTACATC TGGCGGAGGTGGAAGCGGAGGCGGAGGATCTGGTGGTGGTG GATCTTCTGAGGTCCAGCTGCAACAGTCTGGCGCCGAGCTTGT GAAACCTGGCGCCTCTGTGAAGATGAGCTGCAAGGCCAGCGG CTACACCTTCACCAGCTACAACATGCACTGGGTCAAGCAGACC CCTGGACAGGGACTCGAGTGGATCGGAGCCATCTATCCCGGC AATGGCGACACCTCCTACAACCAGAAGTTCAAGGGCAAAGCCA CACTGACCGCCGACAAGAGCAGCAGCACAGCCTACATGCAGCT GAGCAGCCTGACCAGCGAGGACAGCGCCGATTACTACTGCGC CAGAAGCAACTACTACGGCAGCTCCTACTGGTTCTTCGACGTG TGGGGAGCCGGCACCACAGTGACAGTGTCCAGC |
| 141 | Quad 53 Tet | ATGGGCTGGTCCTGCATCATCCTGTTTCTGGTGGCCACAGCCA CAGGCGTGCACAGCGATATTGTGCTGACACAGAGCCCCGCCAT CCTGAGTGCTTCTCCAGGCGAGAAAGTGACCATGACCTGCAGA GCCAGCAGCAGCGTGAACTACATGGACTGGTATCAGAAGAAG CCCGGCAGCAGCCCCAAGCCTTGGATCTACGCCACAAGCAATC TGGCCAGCGGAGTGCCTGCCAGATTTTCTGGCTCTGGCAGCGG CACAAGCTACAGCCTGACAATCAGCAGAGTGGAAGCCGAGGA TGCCGCCACCTACTACTGTCAGCAGTGGTCCTTCAATCCTCCTA CCTTCGGCGGAGGCACCAAGCTGGAAATCAAGGGCTCTACATC TGGCGGAGGTGGAAGCGGAGGCGGAGGATCTGGTGGTGGTG GATCTTCTGAGGTCCAGCTGCAACAGTCTGGCGCCGAGCTTGT GAAACCTGGCGCCTCTGTGAAGATGAGCTGCAAGGCCAGCGG CTACACCTTCACCAGCTACAACATGCACTGGGTCAAGCAGACC CCTGGACAGGGACTCGAGTGGATCGGAGCCATCTATCCCGGC AATGGCGACACCTCCTACAACCAGAAGTTCAAGGGCAAAGCCA CACTGACCGCCGACAAGAGCAGCAGCACAGCCTACATGCAGCT GAGCAGCCTGACCAGCGAGGACAGCGCCGATTACTACTGCGC CAGAAGCAACTACTACGGCAGCTCCTACTGGTTCTTCGACGTG TGGGGAGCCGGCACCACAGTGACAGTGTCCAGCAAGAAAAAG CCCCTGGACGGCGAGTACTTCACACTGCAGATCCGGGGCAGA GAACGCTTCGAGATGTTCAGAGAGCTGAACGAGGCCCTGGAA |
| | | CTGAAGGATGCCCAGGCCGGAAAAGAGCCCGGC |
| 142 | Quad 53 Oct | ATGGGCTGGTCCTGCATCATCCTGTTTCTGGTGGCCACAGCCA CAGGCGTGCACAGCGATATTGTGCTGACACAGAGCCCCGCCAT CCTGAGTGCTTCTCCAGGCGAGAAAGTGACCATGACCTGCAGA GCCAGCAGCAGCGTGAACTACATGGACTGGTATCAGAAGAAG CCCGGCAGCAGCCCCAAGCCTTGGATCTACGCCACAAGCAATC TGGCCAGCGGAGTGCCTGCCAGATTTTCTGGCTCTGGCAGCGG CACAAGCTACAGCCTGACAATCAGCAGAGTGGAAGCCGAGGA TGCCGCCACCTACTACTGTCAGCAGTGGTCCTTCAATCCTCCTA CCTTCGGCGGAGGCACCAAGCTGGAAATCAAGGGCTCTACATC TGGCGGAGGTGGAAGCGGAGGCGGAGGATCTGGTGGTGGTG GATCTTCTGAGGTCCAGCTGCAACAGTCTGGCGCCGAGCTTGT GAAACCTGGCGCCTCTGTGAAGATGAGCTGCAAGGCCAGCGG CTACACCTTCACCAGCTACAACATGCACTGGGTCAAGCAGACC CCTGGACAGGGACTCGAGTGGATCGGAGCCATCTATCCCGGC AATGGCGACACCTCCTACAACCAGAAGTTCAAGGGCAAAGCCA CACTGACCGCCGACAAGAGCAGCAGCACAGCCTACATGCAGCT GAGCAGCCTGACCAGCGAGGACAGCGCCGATTACTACTGCGC CAGAAGCAACTACTACGGCAGCTCCTACTGGTTCTTCGACGTG TGGGGAGCCGGCACCACAGTGACAGTGTCCAGCAAGAAAAAG CCCCTGGACGGCGAGTACTTCACACTGCAGATCCGGGGCAGA GAACGCTTCGAGATGTTCAGAGAGCTGAACGAGGCCCTGGAA CTGAAGGATGCCCAGGCCGGAAAAGAGCCCGGCGATATTGTG CTGACACAGAGCCCCGCCATCCTGAGTGCTTCTCCAGGCGAGA AAGTGACCATGACCTGCAGAGCCAGCAGCAGCGTGAACTACA TGGACTGGTATCAGAAGAAGCCCGGCAGCAGCCCCAAGCCTT GGATCTACGCCACAAGCAATCTGGCCAGCGGAGTGCCTGCCA GATTTTCTGGCTCTGGCAGCGGCACAAGCTACAGCCTGACAAT CAGCAGAGTGGAAGCCGAGGATGCCGCCACCTACTACTGTCA GCAGTGGTCCTTCAATCCTCCTACCTTCGGCGGAGGCACCAAG CTGGAAATCAAGGGCTCTACATCTGGCGGAGGTGGAAGCGGA |
| | | GGCGGAGGATCTGGTGGTGGTGGATCTTCTGAGGTCCAGCTG CAACAGTCTGGCGCCGAGCTTGTGAAACCTGGCGCCTCTGTGA AGATGAGCTGCAAGGCCAGCGGCTACACCTTCACCAGCTACAA CATGCACTGGGTCAAGCAGACCCCTGGACAGGGACTCGAGTG GATCGGAGCCATCTATCCCGGCAATGGCGACACCTCCTACAAC CAGAAGTTCAAGGGCAAAGCCACACTGACCGCCGACAAGAGC AGCAGCACAGCCTACATGCAGCTGAGCAGCCTGACCAGCGAG GACAGCGCCGATTACTACTGCGCCAGAAGCAACTACTACGGCA GCTCCTACTGGTTCTTCGACGTGTGGGGAGCCGGCACCACAGT GACAGTGTCCAGC |
| 143 | Quad 54 | atgggatggtcttgtataattctgttcctggtggcaacagcaacaggagtgcatagc GAGGTGCAGCTGGTTGAATCTGGCGGAGGACTGGTTCAGCCT GGCGGATCTCTGAGACTGTCTTGTGCCGCCAGCGGCTTCACCT TCAGCGACTACTGGATGTACTGGGTCCGACAGGCCCCTGGCAA AGGCCTTGAATGGGTGTCCGAGATCAACACCAACGGCCTGATC ACAAAGTACCCCGACAGCGTGAAGGGCAGATTCACCATCAGCC GGGACAACGCCAAGAACACCCTGTACCTGCAGATGAACAGCCT GCGGCCTGAGGATACCGCCGTGTACTACTGTGCCAGATCTCCC AGCGGATTCAACAGAGGCCAGGGCACACTGGTCACCGTGTCA TCTAAGAAGAAACCACTGGATGGAGAATATTTCACCCTTCAGA TCCGTGGGCGTGAGCGCTTCGAGATGTTCCGAGAGCTGAATG AGGCCTTGGAACTCAAGGATGCCCAGGCTGGGAAGGAGCCAG GGGAGGTGCAGCTGGTTGAATCTGGCGGAGGACTGGTTCAGG CTGGCGGATCTCTGAGACTGTCTTGTGCCGCCAGCGGCAGCAG CTTCAGATTCAGAGCTATGGCCTGGTACAGACAGGCCCCTGAG AAGCAGAGGGATTTCGTGGCCACCATCAACAGCCTGGGCGAG ACAACATATGCCACCGCCGTGGAAGGCCGGTTCACCATCAGCA GAGACAACGCCAAGAACACCGTGTACCTGCAGATGGACAGCC TGAAGCCTGAGGATACCGCCGTGTACTACTGCAACGAGCCCAG AGGCAATTACTGGGGCCAGGGCACACAAGTGACCGTGTCATCT CAC |
| 144 | Quad 55 | atgggatggtcttgtataattctgttcctggtggcaacagcaacaggagtgcatagc |
| | | GAGGTGCAGCTGGTGGAGTCTGGGGGAGGCTTGGTACAGCCC GGCAGGTCCCTGAGACTCTCCTGTGCGGCCTCTGGATTCACCTT TGATGATTATGCCATGCACTGGGTCCGGCAAGCTCCAGGGAAG GGCCTGGAATGGGTCTCAGCTATCACTTGGAATAGTGGTCACA TAGACTATGCGGACTCTGTGGAGGGCCGATTCACCATCTCCAG AGACAACGCCAAGAACTCCCTGTATCTGCAAATGAACAGTCTG AGAGCTGAGGATACGGCCGTATATTACTGTGCGAAAGTCTCGT ACCTTAGCACCGCGTCCTCCCTTGACTATTGGGGCCAAGGTACC CTGGTCACCGTCTCGAGTGGCGGCGGAGGCAGCGGAGGCGG AGGTTCTGGAGGAGGGGGGAGTGACATCCAGATGACCCAGTC TCCATCCTCCCTGTCTGCATCTGTAGGGGACAGAGTCACCATCA CTTGTCGGGCAAGTCAGGGCATCAGAAATTACTTAGCCTGGTA TCAGCAAAAACCAGGGAAAGCCCCTAAGCTCCTGATCTATGCT GCATCCACTTTGCAATCAGGGGTCCCATCTCGGTTCAGTGGCA GTGGATCTGGGACAGATTTCACTCTCACCATCAGCAGCCTACA GCCTGAAGATGTTGCAACTTATTACTGTCAAAGGTATAACCGT GCACCGTATACTTTTGGCCAGGGGACCAAGGTGGAAATCAAA AAGAAGAAACCACTGGATGGAGAATATTTCACCCTTCAGATCC GTGGGCGTGAGCGCTTCGAGATGTTCCGAGAGCTGAATGAGG CCTTGGAACTCAAGGATGCCCAGGCTGGGAAGGAGCCAGGGC AGGTTCAGCTGGTTCAGTCTGGCGCCGAAGTGAAGAAACCTG GCAGCAGCGTGAAGGTGTCCTGCAAGGCCAGCGGCTACAGCT TCACCGACTACCACATCCACTGGGTCCGACAGGCTCCAGGACA AGGCTTGGAATGGATGGGCGTGATCAACCCTATGTACGGCACC ACCGATTACAACCAGCGGTTCAAGGGCAGAGTGACCATCACCG CCGATGAGAGCACAAGCACCGCCTACATGGAACTGAGCAGCC TGAGAAGCGAGGACACCGCCGTGTACTACTGCGCCAGATACG ACTACTTTACCGGCACCGGGGTGTACTGGGGACAGGGAACAC TGGTCACAGTGTCCTCTGGCGGCGGAGGCAGCGGAGGCGGAG GTTCTGGAGGAGGGGGGAGTGACATCGTGATGACCCAGACAC CTCTGAGCCTGAGCGTGACACCTGGACAGCCTGCCAGCATCAG CTGCAGATCCAGCAGATCTCTGGTGCACAGCCGGGGCAATACC TACCTGCACTGGTATCTGCAGAAGCCCGGCCAGTCTCCTCAGCT |
| | | GCTGATCTACAAGGTGTCCAACCGGTTCATCGGCGTGCCCGAT AGATTTTCTGGCAGCGGCTCTGGCACCGACTTCACCCTGAAGA TCTCCAGAGTGGAAGCCGAGGACGTGGGCGTGTACTACTGTA GCCAGAGCACCCATCTGCCTTTCACCTTTGGCCAGGGCACCAA GCTGGAAATCAAGCAC |
| 145 | Quad 56 | atgggatggtcttgtataattctgttcctggtggcaacagcaacaggagtgcatagc GAGGTGCAGCTGGTGGAGTCTGGGGGAGGCTTGGTACAGCCC GGCAGGTCCCTGAGACTCTCCTGTGCGGCCTCTGGATTCACCTT TGATGATTATGCCATGCACTGGGTCCGGCAAGCTCCAGGGAAG GGCCTGGAATGGGTCTCAGCTATCACTTGGAATAGTGGTCACA TAGACTATGCGGACTCTGTGGAGGGCCGATTCACCATCTCCAG AGACAACGCCAAGAACTCCCTGTATCTGCAAATGAACAGTCTG AGAGCTGAGGATACGGCCGTATATTACTGTGCGAAAGTCTCGT ACCTTAGCACCGCGTCCTCCCTTGACTATTGGGGCCAAGGTACC CTGGTCACCGTCTCGAGTGGCGGCGGAGGCAGCGGAGGCGG AGGTTCTGGAGGAGGGGGGAGTGACATCCAGATGACCCAGTC TCCATCCTCCCTGTCTGCATCTGTAGGGGACAGAGTCACCATCA CTTGTCGGGCAAGTCAGGGCATCAGAAATTACTTAGCCTGGTA TCAGCAAAAACCAGGGAAAGCCCCTAAGCTCCTGATCTATGCT GCATCCACTTTGCAATCAGGGGTCCCATCTCGGTTCAGTGGCA GTGGATCTGGGACAGATTTCACTCTCACCATCAGCAGCCTACA GCCTGAAGATGTTGCAACTTATTACTGTCAAAGGTATAACCGT GCACCGTATACTTTTGGCCAGGGGACCAAGGTGGAAATCAAA AAGAAGAAACCACTGGATGGAGAATATTTCACCCTTCAGATCC GTGGGCGTGAGCGCTTCGAGATGTTCCGAGAGCTGAATGAGG CCTTGGAACTCAAGGATGCCCAGGCTGGGAAGGAGCCAGGGG AGGTGCAGCTGGTTGAATCTGGCGGAGGACTGGTTCAGGCTG GCGGATCTCTGAGACTGTCTTGTGCCGCCAGCGGCAGCAGCTT CAGATTCAGAGCTATGGCCTGGTACAGACAGGCCCCTGAGAA GCAGAGGGATTTCGTGGCCACCATCAACAGCCTGGGCGAGAC AACATATGCCACCGCCGTGGAAGGCCGGTTCACCATCAGCAGA GACAACGCCAAGAACACCGTGTACCTGCAGATGGACAGCCTG AAGCCTGAGGATACCGCCGTGTACTACTGCAACGAGCCCAGA |
| | | GGCAATTACTGGGGCCAGGGCACACAAGTGACCGTGTCATCTC AC |
| 146 | Quad 57 | atgggatggtcttgtataattctgttcctggtggcaacagcaacaggagtgcatagc GAGGTGCAGCTGGTTGAATCTGGCGGAGGACTGGTTCAGGCT GGCGGATCTCTGAGACTGTCTTGTGCCGCCAGCGGCAGCAGCT TCAGATTCAGAGCTATGGCCTGGTACAGACAGGCCCCTGAGAA GCAGAGGGATTTCGTGGCCACCATCAACAGCCTGGGCGAGAC AACATATGCCACCGCCGTGGAAGGCCGGTTCACCATCAGCAGA GACAACGCCAAGAACACCGTGTACCTGCAGATGGACAGCCTG AAGCCTGAGGATACCGCCGTGTACTACTGCAACGAGCCCAGA GGCAATTACTGGGGCCAGGGCACACAAGTGACCGTGTCATCTA AGAAGAAACCACTGGATGGAGAATATTTCACCCTTCAGATCCG TGGGCGTGAGCGCTTCGAGATGTTCCGAGAGCTGAATGAGGC CTTGGAACTCAAGGATGCCCAGGCTGGGAAGGAGCCAGGGCA C |
| 147 | Quad 63 | atgggatggtcttgtataattctgttcctggtggcaacagcaacaggagtgcatagc GAGGTGCAGCTGGTGGAGTCTGGGGGAGGCTTGGTACAGCCC GGCAGGTCCCTGAGACTCTCCTGTGCGGCCTCTGGATTCACCTT TGATGATTATGCCATGCACTGGGTCCGGCAAGCTCCAGGGAAG GGCCTGGAATGGGTCTCAGCTATCACTTGGAATAGTGGTCACA TAGACTATGCGGACTCTGTGGAGGGCCGATTCACCATCTCCAG AGACAACGCCAAGAACTCCCTGTATCTGCAAATGAACAGTCTG AGAGCTGAGGATACGGCCGTATATTACTGTGCGAAAGTCTCGT ACCTTAGCACCGCGTCCTCCCTTGACTATTGGGGCCAAGGTACC CTGGTCACCGTCTCGAGTGGCGGCGGAGGCAGCGGAGGCGG AGGTTCTGGAGGAGGGGGGAGTGACATCCAGATGACCCAGTC TCCATCCTCCCTGTCTGCATCTGTAGGGGACAGAGTCACCATCA CTTGTCGGGCAAGTCAGGGCATCAGAAATTACTTAGCCTGGTA TCAGCAAAAACCAGGGAAAGCCCCTAAGCTCCTGATCTATGCT GCATCCACTTTGCAATCAGGGGTCCCATCTCGGTTCAGTGGCA GTGGATCTGGGACAGATTTCACTCTCACCATCAGCAGCCTACA GCCTGAAGATGTTGCAACTTATTACTGTCAAAGGTATAACCGT |
| | | GCACCGTATACTTTTGGCCAGGGGACCAAGGTGGAAATCAAA GGTGGTGGTGGCTCCGGAGGCGGCGGCTCTGGTGGCGGTGG CAGCAAGAAGAAACCACTGGATGGAGAATATTTCACCCTTCAG ATCCGTGGGCGTGAGCGCTTCGAGATGTTCCGAGAGCTGAAT GAGGCCTTGGAACTCAAGGATGCCCAGGCTGGGAAGGAGCCA GGGCAC |
| 148 | Quad 64 | ATGGGCTGGTCCTGCATCATCCTGTTTCTGGTGGCCACAGCCA CAGGCGTGCACAGCGATATTGTGCTGACACAGAGCCCCGCCAT CCTGAGTGCTTCTCCAGGCGAGAAAGTGACCATGACCTGCAGA GCCAGCAGCAGCGTGAACTACATGGACTGGTATCAGAAGAAG CCCGGCAGCAGCCCCAAGCCTTGGATCTACGCCACAAGCAATC TGGCCAGCGGAGTGCCTGCCAGATTTTCTGGCTCTGGCAGCGG CACAAGCTACAGCCTGACAATCAGCAGAGTGGAAGCCGAGGA TGCCGCCACCTACTACTGTCAGCAGTGGTCCTTCAATCCTCCTA CCTTCGGCGGAGGCACCAAGCTGGAAATCAAGGGCTCTACATC TGGCGGAGGTGGAAGCGGAGGCGGAGGATCTGGTGGTGGTG GATCTTCTGAGGTCCAGCTGCAACAGTCTGGCGCCGAGCTTGT GAAACCTGGCGCCTCTGTGAAGATGAGCTGCAAGGCCAGCGG CTACACCTTCACCAGCTACAACATGCACTGGGTCAAGCAGACC CCTGGACAGGGACTCGAGTGGATCGGAGCCATCTATCCCGGC AATGGCGACACCTCCTACAACCAGAAGTTCAAGGGCAAAGCCA CACTGACCGCCGACAAGAGCAGCAGCACAGCCTACATGCAGCT GAGCAGCCTGACCAGCGAGGACAGCGCCGATTACTACTGCGC CAGAAGCAACTACTACGGCAGCTCCTACTGGTTCTTCGACGTG TGGGGAGCCGGCACCACAGTGACAGTGTCCAGCGGCGGAGGT GGAAGCGGAGGCGGAGGATCTGGTGGTGGTGGATCTGCCCCT GAACTGCTGGGCGGACCTTCCGTGTTCCTGTTCCCCCCAAAGCC CAAGGACACCCTGATGATCTCCCGGACCCCCGAAGTGACCTGC GTGGTGGTGGATGTGTCCCACGAGGACCCTGAAGTGAAGTTC AATTGGTACGTGGACGGCGTGGAAGTGCACAACGCCAAGACC AAGCCTAGAGAGGAACAGTACAACTCCACCTACCGGGTGGTG TCCGTGCTGACCGTGCTGCACCAGGATTGGCTGAACGGCAAAG AGTACAAGTGCAAGGTGTCCAACAAGGCCCTGCCTGCCCCCAT |
| | | CGAAAAGACCATCTCCAAGGCCAAGGGCCAGCCCCGGGAACC CCAGGTGTACACACTGCCCCCTAGCAGGGACGAGCTGACCAA GAACCAGGTGTCCCTGACCTGTCTCGTGAAAGGCTTCTACCCCT CCGATATCGCCGTGGAATGGGAGTCCAACGGCCAGCCTGAGA ACAACTACAAGACCACCCCCCCTGTGCTGGACTCCGACGGCTC ATTCTTCCTGTACAGCAAGCTGACAGTGGACAAGTCCCGGTGG CAGCAGGGCAACGTGTTCTCCTGCTCCGTGATGCACGAGGCCC TGCACAACCACTACACCCAGAAGTCCCTGTCCCTGAGCCCCGG CAAGAAGAAAAAGCCCCTGGACGGCGAGTACTTCACACTGCA GATCCGGGGCAGAGAACGCTTCGAGATGTTCAGAGAGCTGAA CGAGGCCCTGGAACTGAAGGATGCCCAGGCCGGAAAAGAGCC CGGC |
| 149 | Quad 65 | ATGGGCTGGTCCTGCATCATCCTGTTTCTGGTGGCCACAGCCA CAGGCGTGCACAGCGATATTGTGCTGACACAGAGCCCCGCCAT CCTGAGTGCTTCTCCAGGCGAGAAAGTGACCATGACCTGCAGA GCCAGCAGCAGCGTGAACTACATGGACTGGTATCAGAAGAAG CCCGGCAGCAGCCCCAAGCCTTGGATCTACGCCACAAGCAATC TGGCCAGCGGAGTGCCTGCCAGATTTTCTGGCTCTGGCAGCGG CACAAGCTACAGCCTGACAATCAGCAGAGTGGAAGCCGAGGA TGCCGCCACCTACTACTGTCAGCAGTGGTCCTTCAATCCTCCTA CCTTCGGCGGAGGCACCAAGCTGGAAATCAAGGGCTCTACATC TGGCGGAGGTGGAAGCGGAGGCGGAGGATCTGGTGGTGGTG GATCTTCTGAGGTCCAGCTGCAACAGTCTGGCGCCGAGCTTGT GAAACCTGGCGCCTCTGTGAAGATGAGCTGCAAGGCCAGCGG CTACACCTTCACCAGCTACAACATGCACTGGGTCAAGCAGACC CCTGGACAGGGACTCGAGTGGATCGGAGCCATCTATCCCGGC AATGGCGACACCTCCTACAACCAGAAGTTCAAGGGCAAAGCCA CACTGACCGCCGACAAGAGCAGCAGCACAGCCTACATGCAGCT GAGCAGCCTGACCAGCGAGGACAGCGCCGATTACTACTGCGC CAGAAGCAACTACTACGGCAGCTCCTACTGGTTCTTCGACGTG TGGGGAGCCGGCACCACAGTGACAGTGTCCAGCAAGAAAAAG CCCCTGGACGGCGAGTACTTCACACTGCAGATCCGGGGCAGA GAACGCTTCGAGATGTTCAGAGAGCTGAACGAGGCCCTGGAA |
| | | CTGAAGGATGCCCAGGCCGGAAAAGAGCCCGGCGCCCCTGAA CTGCTGGGCGGACCTTCCGTGTTCCTGTTCCCCCCAAAGCCCAA GGACACCCTGATGATCTCCCGGACCCCCGAAGTGACCTGCGTG GTGGTGGATGTGTCCCACGAGGACCCTGAAGTGAAGTTCAATT GGTACGTGGACGGCGTGGAAGTGCACAACGCCAAGACCAAGC CTAGAGAGGAACAGTACAACTCCACCTACCGGGTGGTGTCCGT GCTGACCGTGCTGCACCAGGATTGGCTGAACGGCAAAGAGTA CAAGTGCAAGGTGTCCAACAAGGCCCTGCCTGCCCCCATCGAA AAGACCATCTCCAAGGCCAAGGGCCAGCCCCGGGAACCCCAG GTGTACACACTGCCCCCTAGCAGGGACGAGCTGACCAAGAACC AGGTGTCCCTGACCTGTCTCGTGAAAGGCTTCTACCCCTCCGAT ATCGCCGTGGAATGGGAGTCCAACGGCCAGCCTGAGAACAAC TACAAGACCACCCCCCCTGTGCTGGACTCCGACGGCTCATTCTT CCTGTACAGCAAGCTGACAGTGGACAAGTCCCGGTGGCAGCA GGGCAACGTGTTCTCCTGCTCCGTGATGCACGAGGCCCTGCAC AACCACTACACCCAGAAGTCCCTGTCCCTGAGCCCCGGCAAG |
| 150 | W51ScFv | atgggatggtcttgtataattctgttcctggtggcaacagcaacaggagtgcatagc GAGGTGCAGCTGGTGGAGTCTGGGGGAGGCTTGGTACAGCCC GGCAGGTCCCTGAGACTCTCCTGTGCGGCCTCTGGATTCACCTT TGATGATTATGCCATGCACTGGGTCCGGCAAGCTCCAGGGAAG GGCCTGGAATGGGTCTCAGCTATCACTTGGAATAGTGGTCACA TAGACTATGCGGACTCTGTGGAGGGCCGATTCACCATCTCCAG AGACAACGCCAAGAACTCCCTGTATCTGCAAATGAACAGTCTG AGAGCTGAGGATACGGCCGTATATTACTGTGCGAAAGTCTCGT ACCTTAGCACCGCGTCCTCCCTTGACTATTGGGGCCAAGGTACC CTGGTCACCGTCTCGAGTGGCGGCGGAGGCAGCGGAGGCGG AGGTTCTGGAGGAGGGGGGAGTGACATCCAGATGACCCAGTC TCCATCCTCCCTGTCTGCATCTGTAGGGGACAGAGTCACCATCA CTTGTCGGGCAAGTCAGGGCATCAGAAATTACTTAGCCTGGTA TCAGCAAAAACCAGGGAAAGCCCCTAAGCTCCTGATCTATGCT GCATCCACTTTGCAATCAGGGGTCCCATCTCGGTTCAGTGGCA GTGGATCTGGGACAGATTTCACTCTCACCATCAGCAGCCTACA GCCTGAAGATGTTGCAACTTATTACTGTCAAAGGTATAACCGT |
| | | GCACCGTATACTTTTGGCCAGGGGACCAAGGTGGAAATCAAA |

TABLE 10

Amino acid sequences of mature Quad polypeptides

| | | |
|---|---|---|
| SEQ ID NO. | QUAD NO. | AMINO ACID SEQUENCE |
| 151 | Quad 51 | EVQLVESGGGLVQPGRSLRLSCAASGFTFDDYAMHWVRQA PGKGLEWVSAITWNSGHIDYADSVEGRFTISRDNAKNSLY LQMNSLRAEDTAVYYCAKVSYLSTASSLDYWGQGTLVTVS SGGGGSGGGGSGGGGSDIQMTQSPSSLSASVGDRVTITCR ASQGIRNYLAWYQQKPGKAPKLLIYAASTLQSGVPSRFSG SGSGTDFTLTISSLQPEDVATYYCQRYNRAPYTFGQGTKV EIKKKKPLDGEYFTLQIRGRERFEMFRELNEALELKDAQA GKEPG |
| 152 | Quad 53 Mon | DIVLTQSPAILSASPGEKVTMTCRASSSVNYMDWYQKKPG SSPKPWIYATSNLASGVPARFSGSGSGTSYSLTISRVEAE DAATYYCQQWSFNPPTFGGGTKLEIKGSTSGGGGSGGGGS |
| | | GGGGSSEVQLQQSGAELVKPGASVKMSCKASGYTFTSYNM HWVKQTPGQGLEWIGAIYPGNGDTSYNQKFKGKATLTADK SSSTAYMQLSSLTSEDSADYYCARSNYYGSSYWFFDVWGA |
| | | GTTVTVSS |
| 153 | Quad 53 Tet | DIVLTQSPAILSASPGEKVTMTCRASSSVNYMDWYQKKPG SSPKPWIYATSNLASGVPARFSGSGSGTSYSLTISRVEAE DAATYYCQQWSFNPPTFGGGTKLEIKGSTSGGGGSGGGGS |
| | | GGGGSSEVQLQQSGAELVKPGASVKMSCKASGYTFTSYNM HWVKQTPGQGLEWIGAIYPGNGDTSYNQKFKGKATLTADK SSSTAYMQLSSLTSEDSADYYCARSNYYGSSYWFFDVWGA |
| | | GTTVTVSSKKKPLDGEYFTLQIRGRERFEMFRELNEALEL KDAQAGKEPG |
| 154 | Quad 53 Oct | DIVLTQSPAILSASPGEKVTMTCRASSSVNYMDWYQKKPG SSPKPWIYATSNLASGVPARFSGSGSGTSYSLTISRVEAE |
| | | DAATYYCQQWSFNPPTFGGGTKLEIKGSTSGGGGSGGGGS |
| | | GGGGSSEVQLQQSGAELVKPGASVKMSCKASGYTFTSYNM HWVKQTPGQGLEWIGAIYPGNGDTSYNQKFKGKATLTADK SSSTAYMQLSSLTSEDSADYYCARSNYYGSSYWFFDVWGA |
| | | GTTVTVSSKKKPLDGEYFTLQIRGRERFEMFRELNEALEL KDAQAGKEPGDIVLTQSPAILSASPGEKVTMTCRASSSVN YMDWYQKKPGSSPKPWIYATSNLASGVPARFSGSGSGTSY |
| | | SLTISRVEAEDAATYYCQQWSFNPPTFGGGTKLEIKGSTS GGGGSGGGGSGGGGSSEVQLQQSGAELVKPGASVKMSCKA SGYTFTSYNMHWVKQTPGQGLEWIGAIYPGNGDTSYNQKF |
| | | KGKATLTADKSSSTAYMQLSSLTSEDSADYYCARSNYYGS SYWFFDVWGAGTTVTVSS |
| 155 | Quad 54 | EVQLVESGGGLVQPGGSLRLSCAASGFTFSDYWMYWVRQA PGKGLEWVSEINTNGLITKYPDSVKGRFTISRDNAKNTLY LQMNSLRPEDTAVYYCARSPSGFNRGQGTLVTVSSKKKPL |
| | | DGEYFTLQIRGRERFEMFRELNEALELKDAQAGKEPGEVQ LVESGGGLVQAGGSLRLSCAASGSSFRFRAMAWYRQAPEK QRDFVATINSLGETTYATAVEGRFTISRDNAKNTVYLQMD |
| | | SLKPEDTAVYYCNEPRGNYWGQGTQVTVSS |
| 156 | Quad 55 | EVQLVESGGGLVQPGRSLRLSCAASGFTFDDYAMHWVRQA PGKGLEWVSAITWNSGHIDYADSVEGRFTISRDNAKNSLY LQMNSLRAEDTAVYYCAKVSYLSTASSLDYWGQGTLVTVS |
| | | SGGGGSGGGGSGGGGSDIQMTQSPSSLSASVGDRVTITCR ASQGIRNYLAWYQQKPGKAPKLLIYAASTLQSGVPSRFSG SGSGTDFTLTISSLQPEDVATYYCQRYNRAPYTFGQGTKV |
| | | EIKKKKPLDGEYFTLQIRGRERFEMFRELNEALELKDAQA GKEPGQVQLVQSGAEVKKPGSSVKVSCKASGYSFTDYHIH WVRQAPGQGLEWMGVINPMYGTTDYNQRFKGRVTITADES |
| | | TSTAYMELSSLRSEDTAVYYCARYDYFTGTGVYWGQGTLV TVSSGGGGSGGGGSGGGGSDIVMTQTPLSLSVTPGQPASI |
| | | SCRSSRSLVHSRGNTYLHWYLQKPGQSPQLLIYKVSNRFI |
| | | GVPDRFSGSGSGTDFTLKISRVEAEDVGVYYCSQSTHLP |
| | | TFGQGTKLEIK |
| 157 | Quad 56 | EVQLVESGGGLVQPGRSLRLSCAASGFTFDDYAMHWVRQA PGKGLEWVSAITWNSGHIDYADSVEGRFTISRDNAKNSLY LQMNSLRAEDTAVYYCAKVSYLSTASSLDYWGQGTLVTVS |
| | | SGGGGSGGGGSGGGGSDIQMTQSPSSLSASVGDRVTITCR ASQGIRNYLAWYQQKPGKAPKLLIYAASTLQSGVPSRFSG SGSGTDFTLTISSLQPEDVATYYCQRYNRAPYTFGQGTKV |
| | | EIKKKKPLDGEYFTLQIRGRERFEMFRELNEALELKDAQA GKEPGEVQLVESGGGLVQAGGSLRLSCAASGSSFRFRAMA WYRQAPEKQRDFVATINSLGETTYATAVEGRFTISRDNAK |
| | | NTVYLQMDSLKPEDTAVYYCNEPRGNYWGQGTQVTVSS |
| 158 | Quad 57 | EVQLVESGGGLVQAGGSLRLSCAASGSSFRFRAMAWYRQA PEKQRDFVATINSLGETTYATAVEGRFTISRDNAKNTVYL QMDSLKPEDTAVYYCNEPRGNYWGQGTQVTVSSKKKPLDG |
| | | EYFTLQIRGRERFEMFRELNEALELKDAQAGKEPG |
| 159 | Quad 63 | EVQLVESGGGLVQPGRSLRLSCAASGFTFDDYAMHWVRQA PGKGLEWVSAITWNSGHIDYADSVEGRFTISRDNAKNSLY LQMNSLRAEDTAVYYCAKVSYLSTASSLDYWGQGTLVTVS |
| | | SGGGGSGGGGSGGGGSDIQMTQSPSSLSASVGDRVTITCR ASQGIRNYLAWYQQKPGKAPKLLIYAASTLQSGVPSRFSG SGSGTDFTLTISSLQPEDVATYYCQRYNRAPYTFGQGTKV |
| | | EIKGGGGSGGGGSGGGGSKKKPLDGEYFTLQIRGRERFEM FRELNEALELKDAQAGKEPG |
| 160 | Quad 64 | DIVLTQSPAILSASPGEKVTMTCRASSSVNYMDWYQKKPG SSPKPWIYATSNLASGVPARFSGSGSGTSYSLTISRVEAE DAATYYCQQWSFNPPTFGGGTKLEIKGSTSGGGGSGGGGS |
| | | GGGGSSEVQLQQSGAELVKPGASVKMSCKASGYTFTSYNM |
| | | HWVKQTPGQGLEWIGAIYPGNGDTSYNQKFKGKATLTADK SSSTAYMQLSSLTSEDSADYYCARSNYYGSSYWFFDVWGA |
| | | GTTVTVSSGGGGSGGGGSGGGGSAPELLGGPSVFLFPPKP KDTLMISRTPEVTCVVVDVSHEDPEVKFNWYVDGVEVHNA KTKPREEQYNSTYRVVSVLTVLHQDWLNGKEYKCKVSNKA |
| | | LPAPIEKTISKAKGQPREPQVYTLPPSRDELTKNQVSLTC LVKGFYPSDIAVEWESNGQPENNYKTTPPVLDSDGSFFLY SKLTVDKSRWQQGNVFSCSVMHEALHNHYTQKSLSLSPGK |
| | | KKKPLDGEYFTLQIRGRERFEMFRELNEALELKDAQAGKE PG |
| 161 | Quad 65 | DIVLTQSPAILSASPGEKVTMTCRASSSVNYMDWYQKKPG SSPKPWIYATSNLASGVPARFSGSGSGTSYSLTISRVEAE DAATYYCQQWSFNPPTFGGGTKLEIKGSTSGGGGSGGGGS |
| | | GGGGSSEVQLQQSGAELVKPGASVKMSCKASGYTFTSYNM HWVKQTPGQGLEWIGAIYPGNGDTSYNQKFKGKATLTADK SSSTAYMQLSSLTSEDSADYYCARSNYYGSSYWFFDVWGA |
| | | GTTVTVSSKKKPLDGEYFTLQIRGRERFEMFRELNEALEL KDAQAGKEPGAPELLGGPSVFLFPPKPKDTLMISRTPEVT CVVVDVSHEDPEVKFNWYVDGVEVHNAKTKPREEQYNSTY |
| | | RVVSVLTVLHQDWLNGKEYKCKVSNKALPAPIEKTISKAK GQPREPQVYTLPPSRDELTKNQVSLTCLVKGFYPSDIAVE WESNGQPENNYKTTPPVLDSDGSFFLYSKLTVDKSRWQQG |
| | | NVFSCSVMHEALHNHYTQKSLSLSPGK |
| 162 | W51ScFv | EVQLVESGGGLVQPGRSLRLSCAASGFTFDDYAMHWVRQA PGKGLEWVSAITWNSGHIDYADSVEGRFTISRDNAKNSLY LQMNSLRAEDTAVYYCAKVSYLSTASSLDYWGQGTLVTVS |
| | | SGGGGSGGGGSGGGGSDIQMTQSPSSLSASVGDRVTITCR ASQGIRNYLAWYQQKPGKAPKLLIYAASTLQSGVPSRFSG SGSGTDFTLTISSLQPEDVATYYCQRYNRAPYTFGQGTKV |
| | | EIK |

TABLE 11

ED50 of Anti-TNFa Molecules

| Anti-TNFa | ED50 (pM) |
|---|---|
| Quad 51 | 41 |
| Humira | 107 |
| W51ScFv | 246 |

TABLE 12(a)

Amino acid sequence of the hinge region of human IgG isotvpes & sequences

| | | | |
|---|---|---|---|
| Isotype | Upper Hinge | Core Hinge | Lower Hinge/CH2 Region |
| Human IgG1 | EPKSCDKTHT | CPPCP | APELLGGPSV |
| Human IgG2 | ERKCCVE | CPPCP | APPVAGPSV |
| Human IgG3 (exon 1) | ELKTPLGDTTHT | CPRCP | APELLGGPSV |
| Human IgG3 (exons 2, 3, 4) | EPKSCDTPPP | CPRCP | APELLGGPSV |
| Human IgG4 | ESKYGPP | CPSCP | APEFLGGPSV |

CXXC motif of core hinge is underlined

TABLE 12(b)

Further Hinge Sequences. Upper and Core Regions

| | |
|---|---|
| SEQ ID NO 163: | APELLGGPSV |
| SEQ ID NO 164: | PAPELLGGPSV |
| SEQ ID NO 165: | APPVAGPSV |
| SEQ ID NO 166: | PAPPVAGPSV |
| SEQ ID NO 167: | EPKSCDKTHTPAPELLGGPSV |
| SEQ ID NO 168: | EPKSCDKTHTAPELLGGPSV |
| SEQ ID NO 169: | ERKCCVEPAPPVAGPSV |
| SEQ ID NO 170: | ERKCCVEAPPVAGPSV |
| SEQ ID NO 171: | ELKTPLGDTTHTPAPELLGGPSV |
| SEQ ID NO 172: | ELKTPLGDTTHTPAPELLGGPSV |
| SEQ ID NO 173: | EPKSCDTPPPPAPELLGGPSV |
| SEQ ID NO 174: | EPKSCDTPPPAPELLGGPSV |
| SEQ ID NO 175: | APEFLGGPSV |
| SEQ ID NO 176: | PAPEFLGGPSV |
| SEQ ID NO 177: | ESKYGPPPAPEFLGGPSV |
| SEQ ID NO 178: | ESKYGPPAPEFLGGPSV |
| SEQ ID NO 179: | Humira light Chain (see Table 18) |
| SEQ ID NO 180: | CPPC |
| SEQ ID NO 181: | CPRC |
| SEQ ID NO 182: | CPSC |
| SEQ ID NO 183: | EPKSCDKTHT |
| SEQ ID NO 184: | ERKCCVE |
| SEQ ID NO 185: | ELKTPLGDTTHT |
| SEQ ID NO 186: | EPKSCDTPPP |
| SEQ ID NO 187: | ESKYGPP |

TABLE 13

UniProt accession numbers of proteins containing p53 tetramerisation domains (TD)

| | | |
|---|---|---|
| >A0A024R4C3/345-383 | >A0A2I3GNV1/391-430 | >F7FHP5/462-501 |
| >A0A059UCX8/312-350 | >A0A2I3GRR4/391-430 | >F7FN59/397-436 |
| >A0A060XH67/46-81 | >A0A2I3GX41/212-251 | >F7FN64/397-436 |
| >A0A060XN97/313-350 | >A0A2I3H7C7/391-430 | >F7FN69/212-251 |
| >A0A060Z608/94-130 | >A0A2I3HHX4/160-198 | >F7FQR2/76-114 |
| >A0A075BAE6/344-382 | >A0A2I3HR34/391-430 | >F7GA34/345-383 |
| >A0A087R7Z2/374-413 | >A0A2I3HZV6/292-331 | >F7GA47/345-383 |
| >A0A087VQ67/198-237 | >A0A2I3M190/296-334 | >F7GA51/296-334 |
| >A0A087WZU8/308-346 | >A0A2I3M2V8/212-251 | >F7GBG3/297-336 |
| >A0A087X1Q1/160-198 | >A0A2I3M6G1/345-383 | >F7GBG7/297-336 |
| >A0A087X5S1/385-424 | >A0A2I3M9J9/391-430 | >F7GBH1/374-413 |
| >A0A087XP53/284-317 | >A0A2I3MCI3/328-366 | >F7GEP9/271-310 |
| >A0A087XYP3/293-330 | >A0A2I3MEJ7/347-386 | >F7GNX0/321-359 |
| >A0A088DIC9/324-356 | >A0A2I3MFF3/298-336 | >F7GP14/311-349 |
| >A0A091CJU7/316-354 | >A0A2I3MKF2/391-430 | >F7HW67/292-335 |
| >A0A091DI49/487-525 | >A0A2I3MNM6/397-436 | >F7I720/352-391 |
| >A0A091DSC7/272-311 | >A0A2I3MNQ1/292-331 | >F7I9C6/352-391 |
| >A0A091EA06/374-413 | >A0A2I3N2E1/291-329 | >F7I9D3/297-336 |
| >A0A091G407/347-386 | >A0A2I3N5A2/345-383 | >F7I9E9/212-251 |
| >A0A091GU41/346-385 | >A0A2I3N736/391-430 | >F7IGK5/391-430 |
| >A0A091H015/371-410 | >A0A2I3N7F5/345-383 | >F8RKR1/315-351 |
| >A0A091H3D1/198-237 | >A0A2I3NGN2/242-280 | >G1K2L5/294-334 |
| >A0A091HZ84/371-410 | >A0A2I3RBD8/296-335 | >G1L1S8/391-430 |
| >A0A091IJF7/347-386 | >A0A2I3REG9/297-336 | >G1LRQ8/345-384 |
| >A0A091JY20/198-237 | >A0A2I3RJD2/345-383 | >G1MEP6/307-345 |
| >A0A091KM07/374-413 | >A0A2I3RLD5/297-336 | >G1MS14/371-410 |
| >A0A091LTD4/198-237 | >A0A2I3RMS1/296-334 | >G1MS29/207-246 |
| >A0A091LVH3/198-237 | >A0A2I3RNZ6/375-414 | >G1N6I1/293-332 |
| >A0A091M6B6/347-386 | >A0A2I3RVP4/212-251 | >G1PSQ3/371-410 |
| >A0A091MGV6/198-237 | >A0A2I3S1V8/314-352 | >G1PZ51/314-345 |
| >A0A091NGU6/286-325 | >A0A2I3SJI2/345-383 | >G1R4S5/297-336 |
| >A0A091PJY2/198-237 | >A0A2I3SPJ9/345-383 | >G1RF61/287-325 |
| >A0A091PKU4/198-237 | >A0A2I3SZA7/345-383 | >G1SEU0/317-355 |
| >A0A091QIR4/198-237 | >A0A2I3SZK4/391-430 | >G1TBP7/297-336 |
| >A0A091R450/198-237 | >A0A2I3T0Z7/391-430 | >G1U940/294-332 |
| >A0A091RK28/198-237 | >A0A2I4ANK8/293-330 | >G2HEX8/238-276 |
| >A0A091TQD5/198-237 | >A0A2I4ANL9/404-441 | >G3GT84/353-392 |
| >A0A091UUY0/347-386 | >A0A2I4ANN9/379-416 | >G3GY68/74-112 |
| >A0A091VBV4/374-413 | >A0A2I4ANQ2/291-328 | >G3IHF1/290-328 |
| >A0A091VW97/391-430 | >A0A2I4C4P9/303-338 | >G3NTK8/356-393 |
| >A0A093BPE2/104-143 | >A0A2I4C876/81-120 | >G3PK82/295-334 |
| >A0A093BXJ6/60-99 | >A0A2I4CET7/295-334 | >G3Q6V4/297-340 |
| >A0A093E9I7/198-237 | >A0A2I4CET8/386-425 | >G3Q6V7/284-327 |
| >A0A093FLV6/198-237 | >A0A2I4CEU0/291-330 | >G3QQY2/297-336 |
| >A0A093GLW0/374-413 | >A0A2I4CEU4/382-421 | >G3R2U9/319-357 |
| >A0A093HAC9/347-386 | >A0A2J8K8U5/345-383 | >G3RHQ4/345-383 |
| >A0A093HBT9/198-237 | >A0A2J8K8U6/345-383 | >G3RXL5/212-251 |
| >A0A093IHW1/104-143 | >A0A2J8K8U7/345-383 | >G3SZA7/318-357 |
| >A0A093JJ94/283-322 | >A0A2J8K8U9/296-334 | >G3T035/318-356 |
| >A0A093K3B8/391-430 | >A0A2J8K8V2/274-312 | >G3TS21/289-328 |
| >A0A093NBQ1/374-413 | >A0A2J8K8V5/296-334 | >G3TT62/376-415 |
| >A0A093PYK4/391-430 | >A0A2J8K8X6/345-383 | >G3TYZ8/391-430 |
| >A0A093R114/347-386 | >A0A2J8K8Z2/296-334 | >G3U6D1/290-329 |
| >A0A093T5L0/283-322 | >A0A2J8K8Z8/345-383 | >G3U6U6/293-332 |
| >A0A094L4V0/283-322 | >A0A2J8KPA8/308-346 | >G3UAZ0/290-329 |
| >A0A094LB61/374-413 | >A0A2J8KPB0/280-318 | >G3UDE4/288-327 |
| >A0A094MNK3/330-369 | >A0A2J8KPB3/319-357 | >G3UHE5/293-332 |
| >A0A096MBY3/303-335 | >A0A2J8KPB5/160-198 | >G3UI57/286-325 |
| >A0A096MTM8/391-430 | >A0A2J8M649/391-430 | >G3UJ00/286-325 |
| >A0A096N540/345-383 | >A0A2J8M650/391-430 | >G3UK14/298-332 |
| >A0A096P2R8/319-357 | >A0A2J8M651/293-332 | >G3ULT4/293-332 |
| >A0A099ZPQ3/374-413 | >A0A2J8M652/391-430 | >G3UYS2/296-334 |
| >A0A099ZQ65/347-386 | >A0A2J8M655/391-430 | >G3VTK8/202-241 |
| >A0A0A0AG46/374-413 | >A0A2J8M660/212-251 | >G3VZR1/347-386 |
| >A0A0A0AU13/347-386 | >A0A2J8M663/297-336 | >G3WS63/296-334 |
| >A0A0B4VEY6/209-249 | >A0A2J8M665/297-336 | >G3X6J7/346-385 |
| >A0A0B4VFS7/181-221 | >A0A2J8M666/297-336 | >G5B5D6/317-355 |
| >A0A0B7AXG3/73-113 | >A0A2J8M667/387-426 | >G5CA58/391-430 |
| >A0A0B7C164/5-45 | >A0A2J8RWD8/319-357 | >G5CBI6/345-383 |
| >A0A0C4DFW9/296-334 | >A0A2J8RWE9/308-346 | >G7MGI1/345-383 |
| >A0A0C5DEW5/307-345 | >A0A2J8RWG5/160-198 | >G7MK85/391-430 |
| >A0A0C5DID8/307-345 | >A0A2J8RWJ2/254-292 | >G7NTA7/345-383 |
| >A0A0C5E1H5/307-345 | >A0A2J8RWJ8/280-318 | >G7NYP4/391-430 |
| >A0A0D2X0F0/498-530 | >A0A2J8URM7/345-383 | >G7PTI9/319-357 |
| >A0A0D9R9K6/211-250 | >A0A2J8URN5/296-334 | >G9J1L8/307-346 |
| >A0A0D9RG12/319-357 | >A0A2J8URN6/345-383 | >G9J1L9/416-454 |
| >A0A0D9S8U4/345-383 | >A0A2J8URP0/296-334 | >G9J1M0/350-389 |
| >A0A0F6QMK2/371-410 | >A0A2J8URP1/345-383 | >G9KUQ2/301-339 |
| >A0A0F6QNH5/371-410 | >A0A2J8URP3/296-334 | >H0VHZ7/296-334 |
| >A0A0F6QPP8/371-410 | >A0A2J8URQ1/274-312 | >H0VRT2/391-430 |
| >A0A0F6QPQ1/287-326 | >A0A2J8URQ6/345-383 | >H0WNK7/294-333 |
| >A0A0F6T5N8/287-326 | >A0A2J8URQ8/345-383 | >H0WTD3/348-386 |
| >A0A0F6T5N9/287-326 | >A0A2J8WHZ2/391-430 | >H0XGB0/319-357 |
| >A0A0F7YYL7/283-323 | >A0A2J8WHZ4/391-430 | >H0YX04/347-386 |
| >A0A0F7YYL8/287-328 | >A0A2J8WHZ7/297-336 | >H0ZGH4/391-430 |
| >A0A0F7YYP8/275-315 | >A0A2J8WI03/391-430 | >H2EHT1/280-318 |
| >A0A0F7YYQ1/283-323 | >A0A2J8WI05/387-426 | >H2LHQ7/336-373 |
| >A0A0F7YYT3/270-310 | >A0A2J8WI12/297-336 | >H2LPP5/296-337 |
| >A0A0F7YYT4/350-391 | >A0A2J8WI13/391-430 | >H2LPP7/245-286 |
| >A0A0F7YYT5/288-328 | >A0A2J8WI16/212-251 | >H2MLN6/374-413 |
| >A0A0F7YYU0/270-310 | >A0A2J8WI18/297-336 | >H2MLN7/292-331 |
| >A0A0F7YYU1/287-328 | >A0A2J8WI20/297-336 | >H2MLN8/292-331 |
| >A0A0F7YYU2/288-328 | >A0A2J8WI22/293-332 | >H2MLP0/296-335 |
| >A0A0F7YYU7/275-315 | >A0A2K5DGQ7/303-331 | >H2N9D2/244-269 |
| >A0A0F7YYU8/350-391 | >A0A2K5DXG0/283-320 | >H2NSL2/319-357 |
| >A0A0F7YYU9/356-396 | >A0A2K5DXH0/149-176 | >H2PCB7/391-430 |
| >A0A0F8AIC7/289-331 | >A0A2K5E0Y4/345-383 | >H2PXV6/345-383 |
| >A0A0F8AX61/164-203 | >A0A2K5E0Y9/345-383 | >H2QC53/319-357 |
| >A0A0F8CAV8/414-453 | >A0A2K5E0Z8/296-334 | >H2QNY5/391-430 |
| >A0A0G2KB75/105-133 | >A0A2K5E105/345-383 | >H2S6K3/392-431 |
| >A0A0G2KBB2/102-133 | >A0A2K5ESD1/391-430 | >H2S6K4/298-337 |
| >A0A0H3U6U5/312-348 | >A0A2K5ESD6/217-256 | >H2S6K5/273-312 |
| >A0A0K1TP12/317-355 | >A0A2K5ESG6/297-336 | >H2S6K6/294-333 |
| >A0A0L0G1F4/366-392 | >A0A2K5ESH6/296-335 | >H2S6K7/308-347 |
| >A0A0L8G262/360-396 | >A0A2K5ESI5/391-430 | >H2U133/246-281 |
| >A0A0N7FDT7/312-348 | >A0A2K5ESI9/391-430 | >H2U 134/291-326 |
| >A0A0N8JWU8/295-331 | >A0A2K5ESJ1/391-430 | >H2U135/287-322 |
| >A0A0P6J3J0/297-336 | >A0A2K5ESJ8/377-416 | >H2UMJ4/356-393 |
| >A0A0P7UTD5/303-342 | >A0A2K5ESK8/212-251 | >H2UMJ5/351-388 |
| >A0A0P7Y6W7/139-178 | >A0A2K5F3V2/255-292 | >H2UMJ6/286-323 |
| >A0A0Q3M6G6/462-501 | >A0A2K5IAQ7/345-383 | >H2UMJ7/282-319 |
| >A0A0Q3T504/345-384 | >A0A2K5IAT1/296-334 | >H2ZGE3/352-384 |
| >A0A0R2XFU5/51-67 | >A0A2K5IAT6/299-337 | >H2ZH73/107-145 |
| >A0A0R4IHL8/385-424 | >A0A2K5IAV0/242-280 | >H2ZH74/405-443 |
| >A0A0R4IZ80/348-387 | >A0A2K5IAW1/291-329 | >H2ZH75/337-375 |
| >A0A0S2Z4N5/391-430 | >A0A2K5IB21/345-383 | >H3B1Z4/325-365 |
| >A0A0S2Z4N6/387-426 | >A0A2K5IB95/345-383 | >H3B2L6/290-329 |
| >A0A0S7IX91/41-80 | >A0A2K5JJ67/319-357 | >H3BII1/352-391 |
| >A0A0S7K6D3/282-314 | >A0A2K5JJ94/322-360 | >H3CXQ0/301-337 |
| >AOAOU1RQC9/280-318 | >A0A2K5K821/391-430 | >H3D350/357-394 |
| >A0A0U1XP71/182-219 | >A0A2K5K823/391-430 | >H3D8D5/375-414 |
| >A0A0U3KDC1/470-508 | >A0A2K5K834/297-336 | >H6U5S2/319-357 |
| >A0A0U4B546/314-351 | >A0A2K5K835/365-404 | >H6U5S3/319-357 |
| >A0A0U4D4F9/352-387 | >A0A2K5K845/296-335 | >H9FFS1/103-141 |
| >A0A141PNN3/293-332 | >A0A2K5K849/296-335 | >H9G3N4/212-237 |
| >A0A141PNN4/208-247 | >A0A2K5MIE5/212-251 | >H9G5L7/345-384 |
| >A0A142GRI7/315-351 | >A0A2K5MIF0/292-331 | >H9GVA1/99-126 |
| >A0A146NLN6/277-313 | >A0A2K5MIF3/347-386 | >H9N2D2/378-416 |
| >A0A146P3Z1/292-328 | >A0A2K5MIG1/392-431 | >H9N2D3/378-416 |
| >A0A146VRU0/254-290 | >A0A2K5MIH1/391-430 | >H9ZEQ2/293-332 |
| >A0A146VSL6/290-325 | >A0A2K5MIH4/391-430 | >I3J187/356-394 |
| >A0A146X8K2/291-330 | >A0A2K5MIH6/297-336 | >I3KRX9/307-343 |
| >A0A146X8M0/387-426 | >A0A2K5MIP6/391-430 | >I3KT80/392-431 |
| >A0A146X8S3/295-334 | >A0A2K5MWU1/345-383 | >I3LA53/311-348 |
| >A0A146X9W6/383-422 | >A0A2K5MWV4/345-383 | >I3LPD4/391-430 |
| >A0A146XA86/291-330 | >A0A2K5MWV7/345-383 | >I3LPE8/346-385 |
| >A0A146XAK7/291-330 | >A0A2K5MWW4/296-334 | >I3MLP5/391-430 |
| >A0A146XAZ2/383-422 | >A0A2K5MWX3/345-383 | >I3N5N2/317-355 |
| >A0A146XBF3/383-422 | >A0A2K5MX14/242-280 | >I3NDP5/343-381 |
| >A0A146Z8H7/322-359 | >A0A2K5MXC3/345-383 | >I7HIK9/313-350 |
| >A0A146Z8I4/293-330 | >A0A2K5MXD2/296-334 | >K1RC48/553-594 |
| >A0A146Z8Q2/224-261 | >A0A2K5N3I9/319-357 | >K7F8T8/345-384 |
| >A0A146Z9Z7/379-416 | >A0A2K5N3Z0/328-366 | >K7G3P4/312-351 |
| >A0A147ACK6/387-426 | >A0A2K5QQH4/391-430 | >K7GCN3/282-321 |
| >A0A147AT87/94-124 | >A0A2K5QQI1/382-421 | >K7PPA8/319-357 |
| >A0A147B4U1/313-350 | >A0A2K5QQI6/391-430 | >K7PPU4/319-357 |
| >A0A151MM54/441-480 | >A0A2K5QQJ5/297-336 | >K9KFA7/17-55 |
| >A0A151MMC3/437-476 | >A0A2K5QQM5/297-336 | >L5JRP0/371-410 |
| >A0A151MW63/306-341 | >A0A2K5QQM6/296-335 | >L5JZ91/308-342 |
| >A0A151N3K6/400-439 | >A0A2K5QQP2/391-430 | >L5KJ90/409-448 |
| >A0A151N3K8/361-400 | >A0A2K5QQU5/212-251 | >L5LRF0/352-391 |
| >A0A151N445/377-416 | >A0A2K5QR20/235-274 | >L5M0C7/325-357 |
| >A0A158SIS7/313-350 | >A0A2K5QYI7/345-383 | >L5MJN5/108-133 |
| >A0A167VDT2/391-430 | >A0A2K5QYL2/345-383 | >L7N1B2/317-349 |
| >A0A172Q425/316-353 | >A0A2K5QYN8/345-383 | >L7NCR5/316-355 |
| >A0A1A6HG68/222-260 | >A0A2K5QYP8/296-334 | >L7X0Y9/317-356 |
| >A0A1A7X7J4/307-348 | >A0A2K5RMZ8/321-359 | >L7X1P3/317-356 |
| >A0A1A7ZCT3/81-118 | >A0A2K5RN37/282-320 | >L7X447/317-354 |
| >A0A1A8AZS7/38-77 | >A0A2K5TIV2/415-453 | >L8IIU4/371-410 |
| >A0A1A8C8M1/255-293 | >A0A2K5VC74/297-336 | >L8IPI8/312-348 |
| >A0A1A8D5F3/314-349 | >A0A2K5VC97/292-331 | >L8IY21/346-385 |
| >A0A1A8I4T3/1-29 | >A0A2K5VCB4/212-251 | >L9JK63/422-461 |
| >A0A1A8IW64/291-330 | >A0A2K5VCD2/397-436 | >L9KM90/323-358 |
| >A0A1A8JIA0/314-349 | >A0A2K5VCE6/297-336 | >M0R497/209-247 |
| >A0A1A8JZF7/291-330 | >A0A2K5VCE8/391-430 | >M3VVE4/347-386 |
| >A0A1A8N999/312-347 | >A0A2K5VCF3/391-430 | >M3WFF4/461-500 |
| >A0A1A8P8L4/312-345 | >A0A2K5VIY5/345-383 | >M3XIT7/352-391 |
| >A0A1A8UK50/314-349 | >A0A2K5VJ29/242-280 | >M3XWF7/297-336 |
| >A0A1B1CUP8/290-331 | >A0A2K5VJ84/345-383 | >M3Y7P2/416-455 |
| >A0A1B2TT48/312-349 | >A0A2K5VJA4/345-383 | >M3YC88/301-339 |
| >A0A1B8Y052/1-27 | >A0A2K5VJA9/296-334 | >M4APR6/291-330 |
| >A0A1D5QH87/284-322 | >A0A2K5VJB1/345-383 | >M4ASF8/203-240 |
| >A0A1I7Q490/328-366 | >A0A2K5VJC2/291-329 | >M7AN48/275-314 |
| >A0A1L8FGI1/429-468 | >A0A2K5WN47/317-355 | >M7CAH2/325-364 |
| >A0A1L8FMK1/465-504 | >A0A2K5XAH3/306-345 | >O09185/319-357 |
| >A0A1L8G3W1/293-332 | >A0A2K5XAK1/306-345 | >O12946/301-329 |
| >A0A1L8G9P1/293-332 | >A0A2K5XAR2/306-345 | >O15350/345-383 |
| >A0A1L8H4Q1/128-170 | >A0A2K5XAR7/212-251 | >O36006/317-355 |
| >A0A1S2ZRH2/303-341 | >A0A2K5XAS2/306-345 | >O57538/285-316 |
| >A0A1S2ZWK7/405-444 | >A0A2K5XTB8/345-383 | >O70366/316-353 |
| >A0A1 S2ZWM0/405 -444 | >A0A2K5XTC3/296-334 | >O88898/391-430 |
| >A0A1S2ZWM2/297-336 | >A0A2K5XTC5/345-383 | >O93379/295-334 |
| >A0A1S2ZWM5/297-336 | >A0A2K5XTC7/291-329 | >P02340/313-350 |
| >A0A1 S2ZWM8/405 -444 | >A0A2K5XTF6/345-383 | >P04637/319-357 |
| >A0A1S2ZWM9/348-387 | >A0A2K5XTG5/345-383 | >P07193/290-333 |
| >A0A1S3A060/343-381 | >A0A2K6AAH4/319-357 | >P10360/300-335 |
| >A0A1S3A061/341-379 | >A0A2K6AAI9/328-366 | >P10361/317-354 |
| >A0A1S3A068/343-381 | >A0A2K6BU42/347-386 | >P13481/319-357 |
| >A0A1S3EYC1/340-378 | >A0A2K6BU55/391-430 | >P25035/320-355 |
| >A0A1S3FDV5/391-430 | >A0A2K6BU74/397-436 | >P41685/312-350 |
| >A0A1S3FDV9/391-430 | >A0A2K6BU80/212-251 | >P51664/308-345 |
| >A0A1S3FDW4/293-332 | >A0A2K6BUA9/292-331 | >P56423/319-357 |
| >A0A1S3FE88/293-332 | >A0A2K6BUB5/391-430 | >P56424/319-357 |
| >A0A1S3FE98/272-311 | >A0A2K6BUD7/391-430 | >P61260/319-357 |
| >A0A1S3FET2/297-336 | >A0A2K6BUE7/297-336 | >P67938/312-348 |
| >A0A1S3FET7/297-336 | >A0A2K6CLT3/345-383 | >P67939/312-348 |
| >A0A1S3FEU1/293-332 | >A0A2K6CLV3/345-383 | >P79734/293-333 |
| >A0A1S3FFH4/297-336 | >A0A2K6CLW2/298-336 | >P79820/291-334 |
| >A0A1S3FFH7/3 87-426 | >A0A2K6CLW4/345-383 | >P89002/304-341 |
| >A0A1S3FFI4/297-336 | >A0A2K6CLX0/296-334 | >P89003/212-249 |
| >A0A1S3FFS7/391-430 | >A0A2K6CLX4/291-329 | >P89004/212-229 |
| >A0A1S3FFT3/297-336 | >A0A2K6CLX8/345-383 | >P90332/212-249 |
| >A0A1S3GI57/345-383 | >A0A2K6CLY4/242-280 | >Q00366/322-359 |
| >A0A1S3GID5/296-334 | >A0A2K6FGK8/283-321 | >Q0GGT2/405-444 |
| >A0A1S3GJQ8/345-383 | >A0A2K6FGL2/296-334 | >Q0GMA7/311-349 |
| >A0A1S3GJR4/343-381 | >A0A2K6FGL6/283-321 | >Q0H3B6/346-384 |
| >A0A1S3II34/365-404 | >A0A2K6FGL7/283-321 | >Q0H3B7/346-384 |
| >A0A1S3IIC6/286-325 | >A0A2K6GXH2/391-430 | >Q0JRM9/357-397 |
| >A0A1S3IK29/371-410 | >A0A2K6GXH6/391-430 | >Q0Z9Z4/312-348 |
| >A0A1S3MEP3/276-315 | >A0A2K6GXJ5/391-430 | >Q1AMZ5/287-326 |
| >A0A1S3MEY9/375-414 | >A0A2K6GXK1/202-241 | >Q1AMZ6/409-448 |
| >A0A1S3MEZ2/352-391 | >A0A2K6GXL6/297-336 | >Q1AMZ7/287-326 |
| >A0A1S3MFE6/292-331 | >A0A2K6GXM1/291-330 | >Q1AMZ8/409-448 |
| >A0A1S3MQ52/298-337 | >A0A2K6GXQ4/212-251 | >Q1MSX0/308-346 |
| >A0A1S3MQ93/294-333 | >A0A2K6GXQ9/391-430 | >Q1XDZ3/350-391 |
| >A0A1S3MQE2/298-337 | >A0A2K6GZU4/311-349 | >Q27918/143-184 |
| >A0A1S3MQI7/294-333 | >A0A2K6H000/279-317 | >Q27937/344-382 |
| >A0A1S3MRC1/298-337 | >A0A2K6KG94/374-413 | >Q29475/212-250 |
| >AOA1S3N1A7/158-197 | >A0A2K6KGA5/391-430 | >Q29537/307-345 |
| >A0A1S3N1A8/164-203 | >A0A2K6KGA7/391-430 | >Q2XSC7/319-357 |
| >A0A1S3N1S0/164-203 | >A0A2K6KGB7/390-429 | >Q3UGQ1/316-353 |
| >A0A1S3N6N6/317-355 | >A0A2K6KGB9/297-336 | >Q3UVI3/293-332 |
| >A0A1S3N6V0/295-333 | >A0A2K6KGC8/297-336 | >Q4H2Z8/372-406 |
| >A0A1S3RGF1/354-389 | >A0A2K6KGD2/391-430 | >Q4H2Z9/104-147 |
| >A0A1S3RHN6/275-311 | >A0A2K6KGD4/212-251 | >Q4H300/332-375 |
| >A0A1S3SD25/319-356 | >A0A2K6KGE6/292-331 | >Q4H301/406-449 |
| >A0A1S3WGN9/343-381 | >A0A2K6KGG2/272-311 | >Q4S122/283-322 |
| >A0A1S6QMR1/317-356 | >A0A2K6L161/345-383 | >Q4S837/349-386 |
| >A0A1U7Q2G4/322-359 | >A0A2K6L165/345-383 | >Q4VR33/80-119 |
| >A0A1U7QGA5/3 87-426 | >A0A2K6L172/296-334 | >Q502Q9/294-334 |
| >A0A1U7QP43/391-430 | >A0A2K6L176/242-280 | >Q533U3/152-189 |
| >A0A1U7QRT0/391-430 | >A0A2K6L183/345-383 | >Q535D5/75-114 |
| >A0A1U7QUI2/168-206 | >A0A2K6L184/345-383 | >Q535D6/75-114 |
| >A0A1U7RA51/361-400 | >A0A2K6L191/291-329 | >Q539B9/350-389 |
| >A0A1U7RF06/348-387 | >A0A2K6LYM5/319-357 | >Q53CG6/350-389 |
| >A0A1U7RM18/352-391 | >A0A2K6NHJ2/370-409 | >Q53GA5/84-122 |
| >A0A1U7SJ11/303-338 | >A0A2K6NHJ7/297-336 | >Q549C9/316-353 |
| >A0A1U7U5H4/314-352 | >A0A2K6NHJ9/357-396 | >Q569E5/297-336 |
| >A0A1U7UA19/343-381 | >A0A2K6NHK0/212-251 | >Q5CZX0/293-332 |
| >A0A1U7UBS6/391-430 | >A0A2K6NHK3/292-331 | >Q5KQU6/352-391 |
| >A0A1U7UDX9/345-383 | >A0A2K6NHK6/370-409 | >Q5U0E4/319-357 |
| >A0A1U7UHU2/391-430 | >A0A2K6NHK7/370-409 | >Q5XHJ3/290-332 |
| >A0A1U7UHU7/297-336 | >A0A2K6NHL2/370-409 | >Q68VB0/317-355 |
| >A0A1U7ULZ4/391-430 | >A0A2K6QDI6/319-357 | >Q6DG24/292-331 |
| >A0A1U7UM51/345-383 | >A0A2K6RQ20/345-383 | >Q6NTF1/290-332 |
| >A0A1U7UNN1/345-383 | >A0A2K6RQ27/345-383 | >Q6PX73/87-126 |
| >A0A1U7UWH9/297-336 | >A0A2K6RQ35/345-383 | >Q6PX74/81-120 |
| >A0A1U8BI05/322-359 | >A0A2K6RQ45/299-337 | >Q6TDG9/40-76 |
| >A0A1U8C2W8/268-307 | >A0A2K6RQ46/296-334 | >Q6UNX2/352-391 |
| >A0A1U8DCG3/297-336 | >A0A2K6RQ50/242-280 | >Q6WG19/347-388 |
| >A0A1U9W5F4/312-349 | >A0A2K6RQ51/345-383 | >Q6WG20/347-388 |
| >A0A1V4KMC3/3 87-426 | >A0A2K6SLB6/160-198 | >Q71TU9/290-333 |
| >A0A1V4KMH⅔ 87-426 | >A0A2K6SLC5/282-320 | >Q7JP12/135-176 |
| >A0A1V4KNI0/361-400 | >A0A2K6ST65/345-383 | >Q7JP13/344-382 |
| >A0A1V9Y190/398-426 | >A0A2K6ST84/296-334 | >Q7T1D0/290-332 |
| >A0A1W4Y536/311-346 | >A0A2K6ST97/345-383 | >Q801Z7/352-391 |
| >A0A1W4YEN5/186-221 | >A0A2K6STA2/345-383 | >Q80ZA1/316-353 |
| >A0A1W4YF00/386-421 | >A0A2K6UR03/391-430 | >Q8HY32/191-229 |
| >A0A1W4YKL7/349-388 | >A0A2K6UR22/391-430 | >Q8JFE3/292-331 |
| >A0A1W4YLJ9/309-345 | >A0A2K6UR33/382-421 | >Q8JHZ5/296-335 |
| >A0A1W4YUN4/291-330 | >A0A2K6UR38/297-336 | >Q8JHZ6/292-331 |
| >A0A1W4YUY5/350-389 | >A0A2K6UR78/212-251 | >Q8SPZ3/313-351 |
| >A0A1W5AAA0/298-337 | >A0A2K6UR79/297-336 | >Q8T7V3/351-392 |
| >A0A1W5AAA4/294-333 | >A0A2K6UR80/391-430 | >Q91XH8/316-353 |
| >A0A1W5AH30/298-337 | >A0A2K6URF4/272-311 | >Q920Y0/316-353 |
| >A0A1W5AIR4/298-337 | >A5JSV4/301-336 | >Q92143/285-316 |
| >A0A1W5BGP0/491-534 | >A7S4C8/153-191 | >Q95330/317-355 |
| >A0A1W5BI93/406-449 | >A7YYJ7/292-331 | >Q98SW0/293-332 |
| >A0A1W5BJU4/491-534 | >A8DPD6/370-408 | >Q9D6A3/2-30 |
| >A0A1W5BMM1/491-534 | >A9XR54/314-345 | >Q9DEC7/293-332 |
| >A0A1W5BP67/400-443 | >B0R0M3/289-329 | >Q9EPP9/105-133 |
| >A0A1W5W828/297-335 | >B0S576/352-391 | >Q9H3D4/391-430 |
| >A0A1W6BQF7/287-324 | >B0S577/352-391 | >Q9I880/99-135 |
| >A0A1Z5LG07/266-293 | >B3GGC4/344-383 | >Q9I885/99-135 |
| >A0A210QTK4/425-465 | >B3GGC5/344-383 | >Q9JJP2/337-375 |
| >A0A212CRH3/183-222 | >B3GGC6/183-222 | >Q9JJP6/391-430 |
| >A0A212D9G7/220-245 | >B3RZS6/383-422 | >Q9N252/308-345 |
| >A0A218MZN0/291-333 | >B3TLB0/310-349 | >Q9NGC7/358-399 |
| >A0A218UKS0/168-207 | >B4DMH2/294-332 | >Q9NGC8/358-399 |
| >A0A226MN96/387-426 | >B4DNI2/309-347 | >Q9TTA1/319-357 |
| >A0A226PF87/352-391 | >B5TJK8/318-354 | >Q9TUB2/312-349 |
| >A0A250YHC8/325-363 | >B6E4X6/319-357 | >Q9TUX4/202-240 |
| >A0A286XAH3/297-336 | >B7Z8X6/297-336 | >Q9W664/353-392 |
| >A0A286XCS8/296-334 | >B8X347/358-399 | >Q9W678/289-330 |
| >A0A286XNY6/391-430 | >B8X348/358-399 | >Q9W679/304-340 |
| >A0A286XRB4/296-334 | >C0H8X1/320-355 | >Q9WUR6/317-355 |
| >A0A286XSJ9/347-385 | >C0PUM1/309-346 | >Q9XSK8/345-383 |
| >A0A286XW13/349-387 | >C3VC56/308-345 | >R0KB24/324-363 |
| >A0A286Y3E5/391-430 | >C3XPU2/393-433 | >R0KYI4/374-413 |
| >A0A287B3I9/368-405 | >C3YXH3/317-348 | >R4JHU7/351-390 |
| >A0A287BET2/370-409 | >C3ZIW1/75-106 | >R7UHV7/351-390 |
| >A0A287BN74/347-386 | >C6ERD9/314-349 | >R9TM96/107-146 |
| >A0A287D2W7/297-336 | >C9D7C9/297-336 | >R9XXS5/314-350 |
| >A0A287D527/387-426 | >C9D7D0/297-336 | >S4RR03/224-261 |
| >A0A287D7P9/391-430 | >D1LXA7/297-335 | >S7NG87/345-377 |
| >A0A293MX11/320-357 | >D2H062/371-410 | >S7NJH9/356-395 |
| >A0A2B4RUK1/425-463 | >D2HC09/337-376 | >S9WLV0/1-26 |
| >A0A2C9K4I3/338-378 | >D2HPX0/307-345 | >S9WR65/202-241 |
| >A0A2C9K4K6/482-522 | >D4AA88/390-428 | >S9YSN3/345-372 |
| >A0A2D0QVX7/291-330 | >D5KTJ0/307-344 | >T0MFN 1/322-360 |
| >A0A2D0QXV1/297-336 | >D7PQW0/201-241 | >T1EZJ4/247-278 |
| >A0A2D0QYJ0/372-411 | >E3U906/319-357 | >U3CI16/296-334 |
| >A0A2D0RBJ9/317-353 | >E5RMA8/319-357 | >U3D146/321-359 |
| >A0A2D0RXW5/294-333 | >E7FIY6/307-345 | >U3D342/293-332 |
| >A0A2D0RYT4/290-329 | >E9KN92/34-55 | >U3DZ58/345-383 |
| >A0A2D0RZF6/294-333 | >E9KN93/34-55 | >U3EAL5/387-426 |
| >A0A2D4NGD5/97-130 | >E9KN94/34-55 | >U3I844/347-386 |
| >A0A2F0B4V5/365-403 | >E9KN96/34-55 | >U3IZR9/371-410 |
| >A0A2F0BF71/1-26 | >E9KN98/34-55 | >U3JY64/391-430 |
| >A0A2F0BFK9/1-26 | >E9NME8/307-345 | >U3K4S7/359-398 |
| >A0A2G8L3N1/252-284 | >E9QG65/348-387 | >U6D8B7/305-343 |
| >A0A2G9RT86/18-57 | >F1MKA9/391-430 | >V4A869/356-396 |
| >A0A2I0LU30/391-430 | >F1NWD0/297-336 | >V8N2I9/1-18 |
| >A0A2I0LU33/293-332 | >F1P1U2/372-411 | >V8NA72/128-154 |
| >A0A2I0M380/275-314 | >F1PI27/309-347 | >V9I5U2/398-438 |
| >A0A2I0M383/297-336 | >F1PL57/391-430 | >W5KBK0/290-329 |
| >A0A2I0M3A5/297-336 | >F1PYN7/395-434 | >W5KI53/317-352 |
| >A0A2I0UNP3/391-430 | >F1QKD5/292-331 | >W5L3E6/353-392 |
| >A0A2I2U634/408-447 | >F1QLJ1/296-335 | >W5LNF4/309-348 |
| >A0A2I2UUR1/408-447 | >F1SY23/312-348 | >W5MCU3/391-430 |
| >A0A2I2Y444/391-430 | >F4YFP9/398-438 | >W5MCW2/294-333 |
| >A0A2I2Y5B0/391-430 | >F5A7P3/297-336 | >W5MD84/373-412 |
| >A0A2I2Y7Z8/280-318 | >F6MDM8/312-348 | >W5N8V4/315-352 |
| >A0A2I2YKP9/345-383 | >F6SSG7/372-406 | >W5N8V9/310-347 |
| >A0A2I2YQW0/208-247 | >F6TKT0/347-386 | >W5Q2R4/346-385 |
| >A0A2I2YW09/314-352 | >F6TL72/195-233 | >W5Q2R7/346-385 |
| >A0A2I2Z132/238-276 | >F6U7N6/202-241 | >W5QGZ8/386-425 |
| >A0A2I2Z434/391-430 | >F6VXD2/345-383 | >W5QGZ9/353-392 |
| >A0A2I2Z7P9/296-334 | >F6VXE7/242-280 | >W5U837/290-329 |
| >A0A2I2Z9N2/345-383 | >F6ZGN7/298-337 | >W5VJU6/268-305 |
| >A0A2I2ZDS0/375-414 | >F7A9M9/299-331 | >W8FSP6/309-347 |
| >A0A2I2ZIW0/288-326 | >F7A9U0/290-336 | >W8Q7P2/348-387 |
| >A0A2I2ZLA8/297-336 | >F7B2P6/352-391 | >W8Q8J6/385-424 |
| >A0A2I2ZMS7/345-383 | >F7DTE6/145-184 | >Z4YK94/344-382 |
| >A0A2I3GLU2/365-404 | >F7DUR2/389-428 | |

The amino acid sequence position of the TD domain for each protein is also indicated (ie, for the first entry, the TD sequence is amino acid residues 345 to (and including) 383 of the protein disclosed in UniProt with accession number A0A024R4C3).

### Table 14: Quad 68 & 69 Sequences

[2546] SEQ ID NO: 188 (Quad 68 nucleotide sequence)

ATGGGTTGGAGTTGTATAATTCTCTTCCTCGTCGCTACTGCTACTGGTGT
TCATTCTGAGGTCCAATTGTTGGAGTCCGGCGGCGGCGAGGTGCAACCAG
GTGGTTCACTCCGGTTGAGTTGCGCCGCGTCAGGCGGGATTTTCGCGATT
AAACCAATATCATGGTATAGGCAAGCGCCCGGGAAACAACGCGAATGGGT
GTCTACTACCACCAGTTCCGGGGCGACTAACTATGCGGAATCAGTAAAAG
GGCGCTTTACAATATCTCGCGATAATGCGAAGAATACTTTGTATTTGCAA
ATGTCATCTCTCAGGGCGGAAGACACTGCTGTTTATTATTGTAATGTCTT
TGAATACTGGGGTCAAGGTACGTTGGTGACTGTTAAGCCCGGTGGCAGTG
GCGGCTCAGAGGTTCAACTCCTTGAATCCGGAGGAGGTGAGGTCCAACCA
GGCGGAAGTCTCCGCCTTTCATGCGCAGCGTCCGGGTTTAGTTTCTCCAT
TAACGCAATGGGATGGTATCGCCAAGCACCGGGTAAAAGGCGCGAGTTCG
TTGCTGCTATTGAATCAGGTAGGAACACGGTTTACGCTGAATCCGTCAAA
GGGCGATTTACAATATCCCGTGATAATGCGAAGAATACAGTTTATTTGCA
AATGAGTTCACTCAGGGCAGAAGACACGGCGGTTTATTACTGTGGACTGC
TTAAAGGAAATCGGGTCGTCTCCCCCTCTGTCGCGTACTGGGGACAAGGA
ACCCTCGTGACCGTTAAACCCAAGAAGAAACCTCTCGATGGGGAGTACTT
CACTCTCCAAATTCGAGGTAGGGAGAGGTTTGAAATGTTTAGGGAACTCA
ATGAAGCTCTCGAGCTTAAAGACGCGCAAGCTGGTAAGGAACCAGGGCAT
CATCACCATCATCAT

SEQ ID NO: 189 (Quad 69 nucleotide sequence)

ATGGGATGGTCCTGTATTATACTCTTCTTGGTCGCAACCGCGACCGGGGT
ACATAGTGAGGTTCAACTCTTGGAGAGCGGCGGCGGCGAGGTCCAACCCG
GTGGTTCACTCAGGTTGTCCTGCGCAGCAAGTGGCGGAATTTTCGCGATT
AAACCTATTTCATGGTATAGGCAAGCTCCCGGGAAACAACGCGAATGGGT
CTCAACAACGACTTCATCTGGAGCTACAAACTATGCTGAATCAGTTAAAG
GTCGCTTTACAATTTCTCGTGATAATGCGAAGAATACTCTCTATCTGCAA
ATGTCATCATTGAGGGCTGAAGACACTGCTGTCTATTACTGTAATGTATT
TGAATACTGGGGACAAGGGACTCTCGTGACCGTTAAGCCCAAGAAGAAAC
CACTCGATGGAGAGTACTTCACTCTTCAAATACGCGGAAGGGAGCGGTTT
GAAATGTTTCGAGAATTGAATGAAGCGTTGGAGTTGAAAGACGCACAAGC
TGGCAAGGAACCAGGTGAGGTTCAATTGCTTGAGAGCGGCGGCGGGGAAG
TGCAACCAGGCGGTTCCCTCAGATTGAGCTGCGCTGCATCCGGATTTTCC
TTTTCAATTAACGCGATGGGTTGGTATCGACAAGCACCCGGGAAACGTCG
AGAGTTCGTTGCTGCGATAGAATCTGGAAGGAACACTGTTTACGCTGAAA
GTGTTAAAGGAAGGTTTACAATTTCCCGCGATAATGCAAAGAATACAGTC
TATCTTCAAATGTCCAGTCTTCGCGCGGAAGACACTGCAGTCTATTACTG
TGGTCTTCTCAAAGGGAATAGGGTTGTCTCCCCATCCGTCGCTTACTGGG
GACAAGGTACGCTCGTAACTGTCAAACCCCATCATCACCATCATCAT

SEQ ID NO: 190 (Quad 68 amino acid sequence)

MGWSCIILFLVATATGVHSEVQLLESGGGEVQPGGSLRLSCAASGGIFAI
KPISWYRQAPGKQREWVSTTTSSGATNYAESVKGRFTISRDNAKNTLYLQ
MSSLRAEDTAVYYCNVFEYWGQGTLVTVKPGGSGGSEVQLLESGGGEVQP
GGSLRLSCAASGFSFSINAMGWYRQAPGKRREFVAAIESGRNTVYAESVK
GRFTISRDNAKNTVYLQMSSLRAEDTAVYYCGLLKGNRVVSPSVAYWGQG
TLVTVKPKKKPLDGEYFTLQIRGRERFEMFRELNEALELKDAQAGKEPG

SEQ ID NO: 191 (Quad 69 amino acid sequence)

MGWSCIILFLVATATGVHSEVQLLESGGGEVQPGGSLRLSCAASGGIFAI
KPISWYRQAPGKQREWVSTTTSSGATNYAESVKGRFTISRDNAKNTLYLQ
MSSLRAEDTAVYYCNVFEYWGQGTLVTVKPKKKPLDGEYFTLQIRGRERF
EMFRELNEALELKDAQAGKEPGEVQLLESGGGEVQPGGSLRLSCAASGFS
FSINAMGWYRQAPGKRREFVAAIESGRNTVYAESVKGRFTISRDNAKNTV
YLQMSSLRAEDTAVYYCGLLKGNRVVSPSVAYWGQGTLVTVKP

TABLE 15

A table summarizing EC₅₀ values of tetravalent and octavalent Quads (non-Ig and Ig-like) anti-TNFα Quads to neutralize TNFα mediated cytotoxicity in WEHI cells.The fold enhancement in potency for the different Quads over the monovalent control is also shown

| Anti-TNFα dAb Quad | Valency | EC₅₀ (pM) | Fold enhancement of potency vs monovalent control |
|---|---|---|---|
| Anti-TNFα dAb (Monovalent Control) | 1 | 761.5 | - |
| Anti-TNFα dAb-TD | 4 | 96.6 | 8 |
| Anti-TNFα dAb-TD-dAb | 8 | 2.4 | 317 |
| Anti-TNFα dAb monomeric Ig-TD | 4 | 33.7 | 23 |
| Anti-TNFα dAb monomeric Ig-TD/dAb-Kappa | 8 | 2.8 | 272 |

TABLE 16

A table summarizing EC₅₀ values of non-Ig dodeca- and hexadeca-valent anti-TNFα Quads to neutralize TNFα mediated cytotoxicity in WEHI cells. The fold enhancement in potency for the different Quads over the monovalent control is also shown

| Anti-TNFα dAb Quad | Valency | EC₅₀ (pM) | Fold enhancement of potency vs monovalent control |
|---|---|---|---|
| Anti-TNFα dAb (Monovalent Control) | 1 | 1185 | - |
| Tandem anti-TNFα dAb-TD/ anti-TNFα-Kappa | 12 | 1.824 | 650 |
| Tandem anti-TNFα dAb-TD/ Tandem anti-TNFα-Kappa | 16 | 1.555 | 762 |
| Tandem anti-TNFα dAb-TD/ anti-TNFα- | 12 | 2.041 | 581 |
| Lambda | | | |
| Tandem anti-TNFα dAb-TD/ Tandem anti-TNFα-Lambda | 16 | 1.745 | 679 |

TABLE 17

DNA sequences encoding Quad polypeptides

| SEQ ID NO. | QUAD NO. / NAME | NUCLEOTIDE SEQUENCE |
|---|---|---|
| 192 | Q92 | ATGGGCTGGTCATGTATAATCCTCTTTCTTGTAGCCACAGCTA CCGGGGTACACTCAGAAGTTCAACTCGTCGAGAGTGGTGGCGG CTTGGTCCAACCAGGTGGGAGTCTCCGCCTTAGCTGCGCAGCA AGTGGGTTTACGTTTAGTGATTATTGGATGTATTGGGTGCGGC AAGCTCCGGGAAAGGGACTGGAGTGGGTCTCTGAAATTAACAC GAATGGTCTCATTACCAAATATCCTGATAGTGTAAAAGGACGC TTCACAATTTCTAGGGATAATGCAAAGAACACTCTCTACCTTC AAATGAATTCCCTGCGTCCCGAAGACACGGCGGTTTATTATTG CGCTCGATCCCCTAGTGGGTTTAATCGAGGACAAGGAACCCTT GTGACAGTCTCGAGTGCCTCCACTAAGGGGCCGAGTGTTTTTC CACTTGCCCCATCCAGTAAGAGCACCTCTGGAGGAACTGCCGC CCTGGGTTGCCTTGTTAAGGATTACTTCCCTGAGCCAGTAACT GTTAGCTGGAACTCTGGCGCTCTGACCAGCGGAGTGCACACCT TCCCTGCTGTGCTGCAGTCCTCAGGGCTGTACTCCCTTTCTAG TGTCGTAACAGTGCCATCTTCTAGCCTGGGGACCCAGACGTAC ATCTGTAACGTGAATCATAAACCCAGTAACACAAAGGTAGATA AGAAGGTTGAACCTAAGTCCTGCGATAAGACACATACCGCCCC TGAACTGCTGGGCGGACCTTCCGTGTTCCTGTTCCCCCCAAAG CCCAAGGACACCCTGATGATCTCCCGGACCCCCGAAGTGACCT GCGTGGTGGTGGATGTGTCCCACGAGGACCCTGAAGTGAAGTT CAATTGGTACGTGGACGGCGTGGAAGTGCACAACGCCAAGACC AAGCCTAGAGAGGAACAGTACAACTCCACCTACCGGGTGGTGT CCGTGCTGACCGTGCTGCACCAGGATTGGCTGAACGGCAAAGA GTACAAGTGCAAGGTGTCCAACAAGGCCCTGCCTGCCCCCATC GAAAAGACCATCTCCAAGGCCAAGGGCCAGCCCCGGGAACCCC AGGTGTACACACTGCCCCCTAGCAGGGACGAGCTGACCAAGAA CCAGGTGTCCCTGACCTGTCTCGTGAAAGGCTTCTACCCCTCC GATATCGCCGTGGAATGGGAGTCCAACGGCCAGCCTGAGAACA |
| | | ACTACAAGACCACCCCCCCTGTGCTGGACTCCGACGGCTCATT CTTCCTGTACAGCAAGCTGACAGTGGACAAGTCCCGGTGGCAG CAGGGCAACGTGTTCTCCTGCTCCGTGATGCACGAGGCCCTGC ACAACCACTACACCCAGAAGTCCCTGTCCCTGAGCCCCGGCAA GAAGAAAAAGCCCCTGGACGGCGAGTACTTCACACTGCAGATC CGGGGCAGAGAACGCTTCGAGATGTTCAGAGAGCTGAACGAGG CCCTGGAACTGAAGGATGCCCAGGCCGGAAAAGAGCCCGGC |
| 193 | Q93 | ATGGGCTGGTCATGTATAATCCTCTTTCTTGTAGCCACAGCTA CCGGGGTACACTCAGAAGTTCAACTCGTCGAGAGTGGTGGCGG CTTGGTCCAACCAGGTGGGAGTCTCCGCCTTAGCTGCGCAGCA AGTGGGTTTACGTTTAGTGATTATTGGATGTATTGGGTGCGGC AAGCTCCGGGAAAGGGACTGGAGTGGGTCTCTGAAATTAACAC GAATGGTCTCATTACCAAATATCCTGATAGTGTAAAAGGACGC TTCACAATTTCTAGGGATAATGCAAAGAACACTCTCTACCTTC AAATGAATTCCCTGCGTCCCGAAGACACGGCGGTTTATTATTG CGCTCGATCCCCTAGTGGGTTTAATCGAGGACAAGGAACCCTT GTGACAGTAAGCTCAAAACGTACGGTGGCCGCTCCCTCCGTGT TCATCTTCCCACCTTCCGACGAGCAGCTGAAGTCCGGCACCGC TTCTGTCGTGTGCCTGCTGAACAACTTCTACCCCCGCGAGGCC AAGGTGCAGTGGAAGGTGGACAACGCCCTGCAGTCCGGCAACT CCCAGGAATCCGTGACCGAGCAGGACTCCAAGGACAGCACCTA CTCCCTGTCCTCCACCCTGACCCTGTCCAAGGCCGACTACGAG AAGCACAAGGTGTACGCCTGCGAAGTGACCCACCAGGGCCTGT CTAGCCCCGTGACCAAGTCTTTCAACCGGGGCGAGTGT |
| 194 | Q113 | ATGGGTTGGTCTTGTATTATTCTTTTCCTCGTCGCAACCGCTA CCGGGGTCCATTCCGAGGTCCAATTGCTTGAATCCGGAGGAGG TGAAGTGCAACCCGGTGGGTCACTTCGGCTCTCCTGCGCCGCG AGTGGCGGGATTTTCGCTATTAAACCAATTTCCTGGTATCGTC AAGCACCAGGAAAACAACGAGAATGGGTGTCAACTACTACGTC TTCTGGGGCAACTAACTATGCAGAATCAGTCAAAGGACGCTTT ACGATTAGTCGAGATAATGCGAAGAATACTCTTTATCTCCAAA TGTCATCACTCAGGGCAGAAGACACTGCTGTCTATTATTGTAA TGTTTTCGAATACTGGGGTCAAGGAACTTTGGTGACCGTAAAG CCCGGCGGCAGCGGCGGTAGTGAAGTCCAACTCCTCGAGAGTG GAGGAGGGGAAGTGCAACCCGGCGGAAGTTTGCGGCTTAGTTG CGCAGCTTCCGGTTTTAGCTTTAGTATAAACGCAATGGGATGG |
| | | TATCGCCAAGCTCCGGGGAAAAGGCGAGAGTTCGTAGCTGCAA TTGAATCTGGACGTAACACGGTCTACGCAGAATCCGTCAAAGG GCGTTTTACTATTAGTCGCGATAATGCTAAGAATACGGTTTAT CTCCAAATGTCTTCACTCCGGGCAGAAGACACAGCTGTTTATT ACTGTGGATTGCTCAAAGGAAATCGGGTCGTCTCACCGTCAGT CGCGTACTGGGGACAAGGAACCCTTGTGACTGTTAAACCAGGT GGTGGTGGGGACAAGACCCACACCGCCCCTGAACTGCTGGGCG GACCTTCCGTGTTCCTGTTTCCTCCAAAGCCTAAGGACACCCT GATGATCAGCAGAACCCCTGAAGTGACCTGCGTGGTGGTGGAT GTGTCCCACGAGGATCCCGAAGTGAAGTTCAATTGGTACGTGG ACGGCGTGGAAGTGCACAACGCCAAGACCAAGCCTAGAGAGGA ACAGTACAACAGCACCTACAGAGTGGTGTCCGTGCTGACCGTG CTGCACCAGGATTGGCTGAACGGCAAAGAGTACAAGTGCAAGG TGTCCAACAAGGCCCTGCCTGCTCCTATCGAGAAAACCATCAG CAAGGCCAAGGGCCAGCCTAGGGAACCCCAGGTTTACACACTG CCTCCAAGCCGGGAAGAGATGACCAAGAACCAGGTGTCCCTGA CCTGCCTCGTGAAGGGCTTCTACCCTTCCGATATCGCCGTGGA ATGGGAGAGCAATGGCCAGCCAGAGAACAACTACAAGACAACC CCTCCTGTGCTGGACAGCGACGGCTCATTCTTCCTGTACAGCA AGCTGACAGTGGACAAGTCCAGATGGCAGCAGGGCAACGTGTT CTCCTGCTCTGTGATGCACGAGGCCCTGCACAACCACTACACC CAGAAGTCCCTGAGCCTGTCTCCTGGCAAAAAGAAAAAGCCCC TGGACGGCGAGTACTTCACACTGCAAATCCGGGGCAGAGAACG CTTCGAGATGTTCAGAGAGCTGAACGAGGCCCTGGAACTGAAG GATGCCCAGGCCGGAAAAGAGCCCGGC |
| 195 | Q114 | ATGGGTTGGTCTTGTATTATTCTTTTCCTCGTCGCAACCGCTA CCGGGGTCCATTCCGAGGTCCAATTGCTTGAATCCGGAGGAGG TGAAGTGCAACCCGGTGGGTCACTTCGGCTCTCCTGCGCCGCG AGTGGCGGGATTTTCGCTATTAAACCAATTTCCTGGTATCGTC AAGCACCAGGAAAACAACGAGAATGGGTGTCAACTACTACGTC TTCTGGGGCAACTAACTATGCAGAATCAGTCAAAGGACGCTTT ACGATTAGTCGAGATAATGCGAAGAATACTCTTTATCTCCAAA TGTCATCACTCAGGGCAGAAGACACTGCTGTCTATTATTGTAA TGTTTTCGAATACTGGGGTCAAGGAACTTTGGTGACCGTAAAG CCCGGCGGCAGCGGCGGTAGTGAAGTCCAACTCCTCGAGTCCG GAGGAGGTGAAGTGCAACCCGGTGGGTCACTTCGGCTCTCCTG CGCCGCGAGTGGCGGGATTTTCGCTATTAAACCAATTTCCTGG |
| | | TATCGTCAAGCACCAGGAAAACAACGAGAATGGGTGTCAACTA CTACGTCTTCTGGGGCAACTAACTATGCAGAATCAGTCAAAGG ACGCTTTACGATTAGTCGAGATAATGCGAAGAATACTCTTTAT CTCCAAATGTCATCACTCAGGGCAGAAGACACTGCTGTCTATT ATTGTAATGTTTTCGAATACTGGGGTCAAGGAACTTTGGTGAC CGTAAAGCCCGGTGGTGGTGGGGACAAGACCCACACCGCCCCT GAACTGCTGGGCGGACCTTCCGTGTTCCTGTTTCCTCCAAAGC CTAAGGACACCCTGATGATCAGCAGAACCCCTGAAGTGACCTG CGTGGTGGTGGATGTGTCCCACGAGGATCCCGAAGTGAAGTTC AATTGGTACGTGGACGGCGTGGAAGTGCACAACGCCAAGACCA AGCCTAGAGAGGAACAGTACAACAGCACCTACAGAGTGGTGTC CGTGCTGACCGTGCTGCACCAGGATTGGCTGAACGGCAAAGAG TACAAGTGCAAGGTGTCCAACAAGGCCCTGCCTGCTCCTATCG AGAAAACCATCAGCAAGGCCAAGGGCCAGCCTAGGGAACCCCA GGTTTACACACTGCCTCCAAGCCGGGAAGAGATGACCAAGAAC CAGGTGTCCCTGACCTGCCTCGTGAAGGGCTTCTACCCTTCCG ATATCGCCGTGGAATGGGAGAGCAATGGCCAGCCAGAGAACAA CTACAAGACAACCCCTCCTGTGCTGGACAGCGACGGCTCATTC TTCCTGTACAGCAAGCTGACAGTGGACAAGTCCAGATGGCAGC AGGGCAACGTGTTCTCCTGCTCTGTGATGCACGAGGCCCTGCA CAACCACTACACCCAGAAGTCCCTGAGCCTGTCTCCTGGCAAA AAGAAAAAGCCCCTGGACGGCGAGTACTTCACACTGCAAATCC GGGGCAGAGAACGCTTCGAGATGTTCAGAGAGCTGAACGAGGC CCTGGAACTGAAGGATGCCCAGGCCGGAAAAGAGCCCGGC |
| 196 | Q96 | ATGGGCTGGTCATGTATAATCCTCTTTCTTGTAGCCACAGCTA CCGGGGTACACTCAAGCGATACCGGCAGACCCTTCGTGGAAAT GTACAGCGAGATCCCCGAGATCATCCACATGACCGAGGGCAGA GAGCTGGTCATCCCCTGCAGAGTGACAAGCCCCAACATCACCG TGACTCTGAAGAAGTTCCCTCTGGACACACTGATCCCCGACGG CAAGAGAATCATCTGGGACAGCCGGAAGGGCTTCATCATCAGC AACGCCACCTACAAAGAGATCGGCCTGCTGACCTGTGAAGCCA CCGTGAATGGCCACCTGTACAAGACCAACTACCTGACACACAG ACAGACCAACACCATCATCGACGTGGTGCTGAGCCCTAGCCAC GGCATTGAACTGTCTGTGGGCGAGAAGCTGGTGCTGAACTGTA CCGCCAGAACCGAGCTGAACGTGGGCATCGACTTCAACTGGGA GTACCCCAGCAGCAAGCACCAGCACAAGAAACTGGTCAACCGG GACCTGAAAACCCAGAGCGGCAGCGAGATGAAGAAATTCCTGA |
| | | GCACCCTGACCATCGACGGCGTGACCAGATCTGACCAGGGCCT GTACACATGTGCCGCCAGCTCTGGCCTGATGACCAAGAAAAAC AGCACCTTCGTGCGGGTGCACGAGAAGGACAAGACCCACACCG CCCCTGAACTGCTGGGCGGACCTTCCGTGTTCCTGTTTCCTCC AAAGCCTAAGGACACCCTGATGATCAGCAGAACCCCTGAAGTG ACCTGCGTGGTGGTGGATGTGTCCCACGAGGATCCCGAAGTGA AGTTCAATTGGTACGTGGACGGCGTGGAAGTGCACAACGCCAA GACCAAGCCTAGAGAGGAACAGTACAATAGCACCTACAGAGTG GTGTCCGTGCTGACCGTGCTGCACCAGGATTGGCTGAACGGCA AAGAGTACAAGTGCAAGGTGTCCAACAAGGCCCTGCCTGCTCC TATCGAGAAAACCATCTCCAAGGCCAAGGGCCAGCCTAGGGAA CCCCAGGTTTACACACTGCCTCCAAGCAGGGACGAGCTGACAA AGAACCAGGTGTCCCTGACCTGCCTGGTCAAGGGCTTCTACCC TTCCGATATCGCCGTGGAATGGGAGAGCAATGGCCAGCCTGAG AACAACTACAAGACAACCCCTCCTGTGCTGGACAGCGACGGCT CATTCTTCCTGTACAGCAAGCTGACAGTGGACAAGAGCAGATG GCAGCAGGGCAACGTGTTCTCCTGCTCTGTGATGCACGAGGCC CTGCACAACCACTACACCCAGAAGTCCCTGAGCCTGTCTCCTG GAAAGAAAAAGCCCCTGGACGGCGAGTACTTCACACTGCAAAT CCGGGGCAGAGAACGCTTCGAGATGTTCAGAGAGCTGAACGAG GCCCTGGAACTGAAGGATGCCCAGGCCGGAAAAGAGCCCGGC |
| 197 | Q88 monovalent | ATGGGCTGGTCATGTATAATCCTCTTTCTTGTAGCCACAGCTA CCGGGGTACACTCAGAAGTTCAACTCGTCGAGAGTGGTGGCGG CTTGGTCCAACCAGGTGGGAGTCTCCGCCTTAGCTGCGCAGCA AGTGGGTTTACGTTTAGTGATTATTGGATGTATTGGGTGCGGC AAGCTCCGGGAAAGGGACTGGAGTGGGTCTCTGAAATTAACAC GAATGGTCTCATTACCAAATATCCTGATAGTGTAAAAGGACGC TTCACAATTTCTAGGGATAATGCAAAGAACACTCTCTACCTTC AAATGAATTCCCTGCGTCCCGAAGACACGGCGGTTTATTATTG CGCTCGATCCCCTAGTGGGTTTAATCGAGGACAAGGAACCCTT GTGACAGTAAGCTCACAC |
| 198 | Q88 tetravalent | ATGGGCTGGTCATGTATAATCCTCTTTCTTGTAGCCACAGCTA CCGGGGTACACTCAGAAGTTCAACTCGTCGAGAGTGGTGGCGG CTTGGTCCAACCAGGTGGGAGTCTCCGCCTTAGCTGCGCAGCA AGTGGGTTTACGTTTAGTGATTATTGGATGTATTGGGTGCGGC AAGCTCCGGGAAAGGGACTGGAGTGGGTCTCTGAAATTAACAC |
| | | GAATGGTCTCATTACCAAATATCCTGATAGTGTAAAAGGACGC TTCACAATTTCTAGGGATAATGCAAAGAACACTCTCTACCTTC AAATGAATTCCCTGCGTCCCGAAGACACGGCGGTTTATTATTG CGCTCGATCCCCTAGTGGGTTTAATCGAGGACAAGGAACCCTT GTGACAGTAAGCTCAAAGAAGAAGCCCCTTGACGGCGAGTACT TCACACTGCAGATCCGGGGCAGAGAACGCTTCGAGATGTTCAG AGAGCTGAACGAGGCCCTGGAACTGAAGGATGCCCAGGCCGGA AAAGAGCCCGGC |
| 199 | Q88 octavalent | ATGGGCTGGTCATGTATAATCCTCTTTCTTGTAGCCACAGCTA CCGGGGTACACTCAGAAGTTCAACTCGTCGAGAGTGGTGGCGG CTTGGTCCAACCAGGTGGGAGTCTCCGCCTTAGCTGCGCAGCA AGTGGGTTTACGTTTAGTGATTATTGGATGTATTGGGTGCGGC AAGCTCCGGGAAAGGGACTGGAGTGGGTCTCTGAAATTAACAC GAATGGTCTCATTACCAAATATCCTGATAGTGTAAAAGGACGC TTCACAATTTCTAGGGATAATGCAAAGAACACTCTCTACCTTC AAATGAATTCCCTGCGTCCCGAAGACACGGCGGTTTATTATTG CGCTCGATCCCCTAGTGGGTTTAATCGAGGACAAGGAACCCTT GTGACAGTAAGCTCAAAGAAGAAGCCCCTTGACGGCGAGTACT TTACTTTGCAAATACGAGGCAGAGAAAGATTTGAAATGTTTCG GGAACTTAACGAAGCGCTGGAGCTGAAAGACGCGCAAGCCGGC AAAGAACCCGGAGAAGTTCAACTCGTCGAGAGTGGTGGCGGCT TGGTCCAACCAGGTGGGAGTCTCCGCCTTAGCTGCGCAGCAAG TGGGTTTACGTTTAGTGATTATTGGATGTATTGGGTGCGGCAA GCTCCGGGAAAGGGACTGGAGTGGGTCTCTGAAATTAACACGA ATGGTCTCATTACCAAATATCCTGATAGTGTAAAAGGACGCTT CACAATTTCTAGGGATAATGCAAAGAACACTCTCTACCTTCAA ATGAATTCCCTGCGTCCCGAAGACACGGCGGTTTATTATTGCG CTCGATCCCCTAGTGGGTTTAATCGAGGACAAGGAACCCTTGT GACAGTAAGCTCACAC |
| 200 | Q142 | ATGGGCTGGTCATGTATAATCCTCTTTCTTGTAGCCACAGCTA CCGGGGTACACTCAGAAGTTCAACTCGTCGAGAGTGGTGGCGG CTTGGTCCAACCAGGTGGGAGTCTCCGCCTTAGCTGCGCAGCA AGTGGGTTTACGTTTAGTGATTATTGGATGTATTGGGTGCGGC AAGCTCCGGGAAAGGGACTGGAGTGGGTCTCTGAAATTAACAC GAATGGTCTCATTACCAAATATCCTGATAGTGTAAAAGGACGC TTCACAATTTCTAGGGATAATGCAAAGAACACTCTCTACCTTC |
| | | AAATGAATTCCCTGCGTCCCGAAGACACGGCGGTTTATTATTG CGCTCGATCCCCTAGTGGGTTTAATCGAGGACAAGGAACCCTT GTGACAGTCTCGAGTGGCGGCAGCGGCGGTAGTGAAGTTCAAC TCGTCGAGAGTGGTGGCGGCTTGGTCCAACCAGGTGGGAGTCT CCGCCTTAGCTGCGCAGCAAGTGGGTTTACGTTTAGTGATTAT TGGATGTATTGGGTGCGGCAAGCTCCGGGAAAGGGACTGGAGT GGGTCTCTGAAATTAACACGAATGGTCTCATTACCAAATATCC TGATAGTGTAAAAGGACGCTTCACAATTTCTAGGGATAATGCA AAGAACACTCTCTACCTTCAAATGAATTCCCTGCGTCCCGAAG ACACGGCGGTTTATTATTGCGCTCGATCCCCTAGTGGGTTTAA TCGAGGACAAGGAACCCTTGTGACAGTCTCGTCAGGCGGAGGC GGTTCCGGAGGGGGAGGATCCGCCTCCACTAAGGGGCCGAGTG TTTTTCCACTTGCCCCATCCAGTAAGAGCACCTCTGGAGGAAC TGCCGCCCTGGGTTGCCTTGTTAAGGATTACTTCCCTGAGCCA GTAACTGTTAGCTGGAACTCTGGCGCTCTGACCAGCGGAGTGC ACACCTTCCCTGCTGTGCTGCAGTCCTCAGGGCTGTACTCCCT TTCTAGTGTCGTAACAGTGCCATCTTCTAGCCTGGGGACCCAG ACGTACATCTGTAACGTGAATCATAAACCCAGTAACACAAAGG TAGATAAGAAGGTTGAACCTAAGTCCTGCGATAAGACACATAC CAAGAAGAAACCACTGGATGGAGAATATTTCACCCTTCAGATC CGTGGGCGTGAGCGCTTCGAGATGTTCCGAGAGCTGAATGAGG CCTTGGAACTCAAGGATGCCCAGGCTGGGAAGGAGCCAGGGCA C |
| 201 | Q135 | ATGGGCTGGTCATGTATAATCCTCTTTCTTGTAGCCACAGCTA CCGGGGTACACTCAGAAGTTCAACTCGTCGAGAGTGGTGGCGG CTTGGTCCAACCAGGTGGGAGTCTCCGCCTTAGCTGCGCAGCA AGTGGGTTTACGTTTAGTGATTATTGGATGTATTGGGTGCGGC AAGCTCCGGGAAAGGGACTGGAGTGGGTCTCTGAAATTAACAC GAATGGTCTCATTACCAAATATCCTGATAGTGTAAAAGGACGC TTCACAATTTCTAGGGATAATGCAAAGAACACTCTCTACCTTC AAATGAATTCCCTGCGTCCCGAAGACACGGCGGTTTATTATTG CGCTCGATCCCCTAGTGGGTTTAATCGAGGACAAGGAACCCTT GTGACAGTCTCGAGTGGCGGAGGCGGTTCCGGAGGGGGAGGAT CCGGACAGCCAAAAGCAGCCCCATCCGTAACTCTGTTCCCACC TAGTTCAGAGGAGCTTCAAGCAAACAAAGCCACACTTGTTTGC CTTATTAGTGATTTTTATCCCGGTGCCGTGACAGTTGCCTGGA AAGCTGATAGCTCACCAGTGAAAGCTGGCGTGGAGACAACCAC |
| | | ACCATCTAAACAAAGCAATAACAAGTATGCTGCCAGCTCATAT CTGAGTCTCACTCCAGAACAATGGAAGTCTCATCGGTCCTATA GCTGTCAAGTGACCCACGAAGGCAGTACCGTCGAGAAGACCGT GGCACCAACAGAGTGTAGC |
| 202 | Q136 | ATGGGCTGGTCATGTATAATCCTCTTTCTTGTAGCCACAGCTA CCGGGGTACACTCAGAAGTTCAACTCGTCGAGAGTGGTGGCGG CTTGGTCCAACCAGGTGGGAGTCTCCGCCTTAGCTGCGCAGCA AGTGGGTTTACGTTTAGTGATTATTGGATGTATTGGGTGCGGC AAGCTCCGGGAAAGGGACTGGAGTGGGTCTCTGAAATTAACAC GAATGGTCTCATTACCAAATATCCTGATAGTGTAAAAGGACGC TTCACAATTTCTAGGGATAATGCAAAGAACACTCTCTACCTTC AAATGAATTCCCTGCGTCCCGAAGACACGGCGGTTTATTATTG CGCTCGATCCCCTAGTGGGTTTAATCGAGGACAAGGAACCCTT GTGACAGTCTCGAGTGGCGGAGGCGGTTCCGGAGGGGGAGGAT CCAAACGTACGGTGGCCGCTCCCTCCGTGTTCATCTTCCCACC TTCCGACGAGCAGCTGAAGTCCGGCACCGCTTCTGTCGTGTGC CTGCTGAACAACTTCTACCCCCGCGAGGCCAAGGTGCAGTGGA AGGTGGACAACGCCCTGCAATCCGGCAACTCCCAGGAATCCGT GACCGAGCAGGACTCCAAGGACAGCACCTACTCCCTGTCCTCC ACCCTGACCCTGTCCAAGGCCGACTACGAGAAGCACAAGGTGT ACGCCTGCGAAGTGACCCACCAGGGCCTGTCTAGCCCCGTGAC CAAGTCTTTCAACCGGGGCGAGTGT |
| 203 | Q144 | ATGGGCTGGTCATGTATAATCCTCTTTCTTGTAGCCACAGCTA CCGGGGTACACTCAGAAGTTCAACTCGTCGAGAGTGGTGGCGG CTTGGTCCAACCAGGTGGGAGTCTCCGCCTTAGCTGCGCAGCA AGTGGGTTTACGTTTAGTGATTATTGGATGTATTGGGTGCGGC AAGCTCCGGGAAAGGGACTGGAGTGGGTCTCTGAAATTAACAC GAATGGTCTCATTACCAAATATCCTGATAGTGTAAAAGGACGC TTCACAATTTCTAGGGATAATGCAAAGAACACTCTCTACCTTC AAATGAATTCCCTGCGTCCCGAAGACACGGCGGTTTATTATTG CGCTCGATCCCCTAGTGGGTTTAATCGAGGACAAGGAACCCTT GTGACAGTCTCGAGTGGCGGCAGCGGCGGTAGTGAAGTTCAAC TCGTCGAGAGTGGTGGCGGCTTGGTCCAACCAGGTGGGAGTCT CCGCCTTAGCTGCGCAGCAAGTGGGTTTACGTTTAGTGATTAT TGGATGTATTGGGTGCGGCAAGCTCCGGGAAAGGGACTGGAGT GGGTCTCTGAAATTAACACGAATGGTCTCATTACCAAATATCC |
| | | TGATAGTGTAAAAGGACGCTTCACAATTTCTAGGGATAATGCA AAGAACACTCTCTACCTTCAAATGAATTCCCTGCGTCCCGAAG ACACGGCGGTTTATTATTGCGCTCGATCCCCTAGTGGGTTTAA TCGAGGACAAGGAACCCTTGTGACAGTCTCGTCAGGCGGAGGC GGTTCCGGAGGGGGAGGATCCGGACAGCCAAAAGCAGCCCCAT CCGTAACTCTGTTCCCACCTAGTTCAGAGGAGCTTCAAGCAAA CAAAGCCACACTTGTTTGCCTTATTAGTGATTTTTATCCCGGT GCCGTGACAGTTGCCTGGAAAGCTGATAGCTCACCAGTGAAAG CTGGCGTGGAGACAACCACACCATCTAAACAAAGCAATAACAA GTATGCTGCCAGCTCATATCTGAGTCTCACTCCAGAACAATGG AAGTCTCATCGGTCCTATAGCTGTCAAGTGACCCACGAAGGCA GTACCGTCGAGAAGACCGTGGCACCAACAGAGTGTAGC |
| 204 | Q145 | ATGGGCTGGTCATGTATAATCCTCTTTCTTGTAGCCACAGCTA CCGGGGTACACTCAGAAGTTCAACTCGTCGAGAGTGGTGGCGG CTTGGTCCAACCAGGTGGGAGTCTCCGCCTTAGCTGCGCAGCA AGTGGGTTTACGTTTAGTGATTATTGGATGTATTGGGTGCGGC AAGCTCCGGGAAAGGGACTGGAGTGGGTCTCTGAAATTAACAC GAATGGTCTCATTACCAAATATCCTGATAGTGTAAAAGGACGC TTCACAATTTCTAGGGATAATGCAAAGAACACTCTCTACCTTC AAATGAATTCCCTGCGTCCCGAAGACACGGCGGTTTATTATTG CGCTCGATCCCCTAGTGGGTTTAATCGAGGACAAGGAACCCTT GTGACAGTCTCGAGTGGCGGCAGCGGCGGTAGTGAAGTTCAAC TCGTCGAGAGTGGTGGCGGCTTGGTCCAACCAGGTGGGAGTCT CCGCCTTAGCTGCGCAGCAAGTGGGTTTACGTTTAGTGATTAT TGGATGTATTGGGTGCGGCAAGCTCCGGGAAAGGGACTGGAGT GGGTCTCTGAAATTAACACGAATGGTCTCATTACCAAATATCC TGATAGTGTAAAAGGACGCTTCACAATTTCTAGGGATAATGCA AAGAACACTCTCTACCTTCAAATGAATTCCCTGCGTCCCGAAG ACACGGCGGTTTATTATTGCGCTCGATCCCCTAGTGGGTTTAA TCGAGGACAAGGAACCCTTGTGACAGTCTCGTCAGGCGGAGGC GGTTCCGGAGGGGGAGGATCCAAACGTACGGTGGCCGCTCCCT CCGTGTTCATCTTCCCACCTTCCGACGAGCAGCTGAAGTCCGG CACCGCTTCTGTCGTGTGCCTGCTGAACAACTTCTACCCCCGC GAGGCCAAGGTGCAGTGGAAGGTGGACAACGCCCTGCAATCCG GCAACTCCCAGGAATCCGTGACCGAGCAGGACTCCAAGGACAG CACCTACTCCCTGTCCTCCACCCTGACCCTGTCCAAGGCCGAC TACGAGAAGCACAAGGTGTACGCCTGCGAAGTGACCCACCAGG |
| | | GCCTGTCTAGCCCCGTGACCAAGTCTTTCAACCGGGGCGAGTG T |
| 205 | Avelumab Fab monomeric Ig Quad (Heavy Chain) | ATGGGCTGGTCATGTATAATCCTCTTTCTTGTAGCCACAGCTA CCGGGGTACACTCAGAAGTGCAGCTGCTGGAATCTGGCGGAGG ACTGGTTCAACCTGGCGGCTCTCTGAGACTGTCTTGTGCCGCC AGCGGCTTCACCTTCAGCAGCTATATCATGATGTGGGTCCGAC AGGCCCCTGGCAAAGGCCTTGAATGGGTGTCCAGCATCTATCC CAGCGGCGGCATCACCTTTTACGCCGACACAGTGAAGGGCAGA TTCACCATCAGCCGGGACAACAGCAAGAACACCCTGTACCTGC AGATGAACAGCCTGAGAGCCGAGGACACCGCCGTGTACTACTG CGCCAGAATCAAGCTGGGCACCGTGACCACCGTGGATTATTGG GGACAGGGCACCCTGGTCACCGTCTCGAGTGCCTCCACTAAGG GGCCGAGTGTTTTTCCACTTGCCCCATCCAGTAAGAGCACCTC TGGAGGAACTGCCGCCCTGGGTTGCCTTGTTAAGGATTACTTC CCTGAGCCAGTAACTGTTAGCTGGAACTCTGGCGCTCTGACCA GCGGAGTGCACACCTTCCCTGCTGTGCTGCAGTCCTCAGGGCT GTACTCCCTTTCTAGTGTCGTAACAGTGCCATCTTCTAGCCTG GGGACCCAGACGTACATCTGTAACGTGAATCATAAACCCAGTA ACACAAAGGTAGATAAGAAGGTTGAACCTAAGTCCTGCGATAA GACACATACCGCCCCTGAACTGCTGGGCGGACCTTCCGTGTTC CTGTTCCCCCCAAAGCCCAAGGACACCCTGATGATCTCCCGGA CCCCCGAAGTGACCTGCGTGGTGGTGGATGTGTCCCACGAGGA CCCTGAAGTGAAGTTCAATTGGTACGTGGACGGCGTGGAAGTG CACAACGCCAAGACCAAGCCTAGAGAGGAACAGTACAACTCCA CCTACCGGGTGGTGTCCGTGCTGACCGTGCTGCACCAGGATTG GCTGAACGGCAAAGAGTACAAGTGCAAGGTGTCCAACAAGGCC CTGCCTGCCCCCATCGAAAAGACCATCTCCAAGGCCAAGGGCC AGCCCCGGGAACCCCAGGTGTACACACTGCCCCCTAGCAGGGA CGAGCTGACCAAGAACCAGGTGTCCCTGACCTGTCTCGTGAAA GGCTTCTACCCCTCCGATATCGCCGTGGAATGGGAGTCCAACG GCCAGCCTGAGAACAACTACAAGACCACCCCCCCTGTGCTGGA CTCCGACGGCTCATTCTTCCTGTACAGCAAGCTGACAGTGGAC AAGTCCCGGTGGCAGCAGGGCAACGTGTTCTCCTGCTCCGTGA TGCACGAGGCCCTGCACAACCACTACACCCAGAAGTCCCTGTC CCTGAGCCCCGGCAAGAAGAAAAAGCCCCTGGACGGCGAGTAC TTCACACTGCAGATCCGGGGCAGAGAACGCTTCGAGATGTTCA GAGAGCTGAACGAGGCCCTGGAACTGAAGGATGCCCAGGCCGG |
| | | AAAAGAGCCCGGC |
| 206 | Avelumab Light Chain | ATGGGCTGGTCATGTATAATCCTCTTTCTTGTAGCCACAGCTA CCGGGGTACACTCACAGTCTGCTCTGACACAGCCTGCCTCTGT GTCTGGCTCTCCTGGCCAGAGCATCACCATCAGCTGTACCGGC ACCAGCTCTGATGTCGGCGGCTACAATTACGTGTCCTGGTATC AGCAGCACCCCGGCAAGGCCCCTAAGCTGATGATCTACGACGT GTCCAACAGACCCAGCGGCGTGTCCAATAGATTCTCCGGCAGC AAGAGCGGCAACACCGCCAGCCTGACAATTAGCGGACTGCAGG CCGAGGACGAGGCCGATTACTACTGTAGCAGCTACACCAGCTC CAGCACCAGAGTGTTTGGCACCGGCACAAAAGTGACCGTGCTG GGCCAGCCTAAGGCCAATCCTACCGTGACACTGTTCCCTCCAA GCAGCGAGGAACTGCAGGCTAACAAGGCCACACTCGTGTGCCT GATCAGCGACTTTTATCCTGGCGCCGTGACCGTGGCCTGGAAG GCTGATGGATCTCCTGTGAAAGCCGGCGTGGAAACCACCAAGC CTAGCAAGCAGAGCAACAACAAATACGCCGCCAGCAGCTACCT GAGCCTGACACCTGAGCAGTGGAAGTCCCACAGATCCTACAGC TGCCAAGTGACCCACGAGGGCAGCACCGTGGAAAAAACAGTGG CCCCTACCGAGTGCAGC |
| 207 | Humira Fab monomeric Ig Quad (Heavy Chain) | ATGGGATGGTCTTGTATAATTCTGTTCCTGGTGGCAACAGCAA CAGGAGTGCATAGCGAGGTGCAGCTGGTGGAGTCTGGGGGAGG CTTGGTACAGCCCGGCAGGTCCCTGAGACTCTCCTGTGCGGCC TCTGGATTCACCTTTGATGATTATGCCATGCACTGGGTCCGGC AAGCTCCAGGGAAGGGCCTGGAATGGGTCTCAGCTATCACTTG GAATAGTGGTCACATAGACTATGCGGACTCTGTGGAGGGCCGA TTCACCATCTCCAGAGACAACGCCAAGAACTCCCTGTATCTGC AAATGAACAGTCTGAGAGCTGAGGATACGGCCGTATATTACTG TGCGAAAGTCTCGTACCTTAGCACCGCGTCCTCCCTTGACTAT TGGGGCCAAGGTACCCTGGTCACCGTCTCGAGTGCCTCCACTA AGGGGCCGAGTGTTTTTCCACTTGCCCCATCCAGTAAGAGCAC CTCTGGAGGAACTGCCGCCCTGGGTTGCCTTGTTAAGGATTAC TTCCCTGAGCCAGTAACTGTTAGCTGGAACTCTGGCGCTCTGA CCAGCGGAGTGCACACCTTCCCTGCTGTGCTGCAGTCCTCAGG GCTGTACTCCCTTTCTAGTGTCGTAACAGTGCCATCTTCTAGC CTGGGGACCCAGACGTACATCTGTAACGTGAATCATAAACCCA GTAACACAAAGGTAGATAAGAAGGTTGAACCTAAGTCCTGCGA TAAGACACATACCGCCCCTGAACTGCTGGGCGGACCTTCCGTG |
| | | TTCCTGTTCCCCCCAAAGCCCAAGGACACCCTGATGATCTCCC GGACCCCCGAAGTGACCTGCGTGGTGGTGGATGTGTCCCACGA GGACCCTGAAGTGAAGTTCAATTGGTACGTGGACGGCGTGGAA GTGCACAACGCCAAGACCAAGCCTAGAGAGGAACAGTACAACT CCACCTACCGGGTGGTGTCCGTGCTGACCGTGCTGCACCAGGA TTGGCTGAACGGCAAAGAGTACAAGTGCAAGGTGTCCAACAAG GCCCTGCCTGCCCCCATCGAAAAGACCATCTCCAAGGCCAAGG GCCAGCCCCGGGAACCCCAGGTGTACACACTGCCCCCTAGCAG GGACGAGCTGACCAAGAACCAGGTGTCCCTGACCTGTCTCGTG AAAGGCTTCTACCCCTCCGATATCGCCGTGGAATGGGAGTCCA ACGGCCAGCCTGAGAACAACTACAAGACCACCCCCCCTGTGCT GGACTCCGACGGCTCATTCTTCCTGTACAGCAAGCTGACAGTG GACAAGTCCCGGTGGCAGCAGGGCAACGTGTTCTCCTGCTCCG TGATGCACGAGGCCCTGCACAACCACTACACCCAGAAGTCCCT GTCCCTGAGCCCCGGCAAGAAGAAAAAGCCCCTGGACGGCGAG TACTTCACACTGCAGATCCGGGGCAGAGAACGCTTCGAGATGT TCAGAGAGCTGAACGAGGCCCTGGAACTGAAGGATGCCCAGGC CGGAAAAGAGCCCGGC |
| 208 | Humira Light Chain | ATGGGATGGTCTTGTATAATTCTGTTCCTGGTGGCAACAGCAA CAGGAGTGCATAGCGACATCCAGATGACCCAGTCTCCATCCTC CCTGTCTGCATCTGTAGGGGACAGAGTCACCATCACTTGTCGG GCAAGTCAGGGCATCAGAAATTACTTAGCCTGGTATCAGCAAA AACCAGGGAAAGCCCCTAAGCTCCTGATCTATGCTGCATCCAC TTTGCAATCAGGGGTCCCATCTCGGTTCAGTGGCAGTGGATCT GGGACAGATTTCACTCTCACCATCAGCAGCCTACAGCCTGAAG ATGTTGCAACTTATTACTGTCAAAGGTATAACCGTGCACCGTA TACTTTTGGCCAGGGGACCAAGGTGGAAATCAAACGTACGGTG GCCGCTCCCTCCGTGTTCATCTTCCCACCTTCCGACGAGCAGC TGAAGTCCGGCACCGCTTCTGTCGTGTGCCTGCTGAACAACTT CTACCCCCGCGAGGCCAAGGTGCAGTGGAAGGTGGACAACGCC CTGCAGTCCGGCAACTCCCAGGAATCCGTGACCGAGCAGGACT CCAAGGACAGCACCTACTCCCTGTCCTCCACCCTGACCCTGTC CAAGGCCGACTACGAGAAGCACAAGGTGTACGCCTGCGAAGTG ACCCACCAGGGCCTGTCTAGCCCCGTGACCAAGTCTTTCAACC GGGGCGAGTGT |

TABLE 18

Amino acid sequences of mature Quad polypeptides

| | | |
|---|---|---|
| SEQ ID NO. | QUAD NO. / NAME | AMINO ACID SEQUENCE |
| 209 | Q92 | EVQLVESGGGLVQPGGSLRLSCAASGFTFSDYWMYWVRQAPGK GLEWVSEINTNGLITKYPDSVKGRFTISRDNAKNTLYLQMNSL RPEDTAVYYCARSPSGFNRGQGTLVTVSSASTKGPSVFPLAPS SKSTSGGTAALGCLVKDYFPEPVTVSWNSGALTSGVHTFPAVL QSSGLYSLSSVVTVPSSSLGTQTYICNVNHKPSNTKVDKKVEP KSCDKTHTAPELLGGPSVFLFPPKPKDTLMISRTPEVTCVVVD VSHEDPEVKFNWYVDGVEVHNAKTKPREEQYNSTYRVVSVLTV LHQDWLNGKEYKCKVSNKALPAPIEKTISKAKGQPREPQVYTL PPSRDELTKNQVSLTCLVKGFYPSDIAVEWESNGQPENNYKTT PPVLDSDGSFFLYSKLTVDKSRWQQGNVFSCSVMHEALHNHYT QKSLSLSPGKKKKPLDGEYFTLQIRGRERFEMFRELNEALELK DAQAGKEPG |
| 210 | Q93 | EVQLVESGGGLVQPGGSLRLSCAASGFTFSDYWMYWVRQAPGK GLEWVSEINTNGLITKYPDSVKGRFTISRDNAKNTLYLQMNSL RPEDTAVYYCARSPSGFNRGQGTLVTVSSKRTVAAPSVFIFPP SDEQLKSGTASVVCLLNNFYPREAKVQWKVDNALQSGNSQESV TEQDSKDSTYSLSSTLTLSKADYEKHKVYACEVTHQGLSSPVT KSFNRGEC |
| 211 | Q113 | EVQLLESGGGEVQPGGSLRLSCAASGGIFAIKPISWYRQAPGK QREWVSTTTSSGATNYAESVKGRFTISRDNAKNTLYLQMSSLR AEDTAVYYCNVFEYWGQGTLVTVKPGGSGGSEVQLLESGGGEV QPGGSLRLSCAASGFSFSINAMGWYRQAPGKRREFVAAIESGR NTVYAESVKGRFTISRDNAKNTVYLQMSSLRAEDTAVYYCGLL KGNRVVSPSVAYWGQGTLVTVKPGGGGDKTHTAPELLGGPSVF LFPPKPKDTLMISRTPEVTCVVVDVSHEDPEVKFNWYVDGVEV HNAKTKPREEQYNSTYRVVSVLTVLHQDWLNGKEYKCKVSNKA LPAPIEKTISKAKGQPREPQVYTLPPSREEMTKNQVSLTCLVK |
| | | GFYPSDIAVEWESNGQPENNYKTTPPVLDSDGSFFLYSKLTVD KSRWQQGNVFSCSVMHEALHNHYTQKSLSLSPGKKKKPLDGEY FTLQIRGRERFEMFRELNEALELKDAQAGKEPG |
| 212 | Q114 | EVQLLESGGGEVQPGGSLRLSCAASGGIFAIKPISWYRQAPGK QREWVSTTTSSGATNYAESVKGRFTISRDNAKNTLYLQMSSLR AEDTAVYYCNVFEYWGQGTLVTVKPGGSGGSEVQLLESGGGEV QPGGSLRLSCAASGGIFAIKPISWYRQAPGKQREWVSTTTSSG ATNYAESVKGRFTISRDNAKNTLYLQMSSLRAEDTAVYYCNVF EYWGQGTLVTVKPGGGGDKTHTAPELLGGPSVFLFPPKPKDTL MISRTPEVTCVVVDVSHEDPEVKFNWYVDGVEVHNAKTKPREE QYNSTYRVVSVLTVLHQDWLNGKEYKCKVSNKALPAPIEKTIS KAKGQPREPQVYTLPPSREEMTKNQVSLTCLVKGFYPSDIAVE WESNGQPENNYKTTPPVLDSDGSFFLYSKLTVDKSRWQQGNVF SCSVMHEALHNHYTQKSLSLSPGKKKKPLDGEYFTLQIRGRER FEMFRELNEALELKDAQAGKEPG |
| 213 | Q96 | SDTGRPFVEMYSEIPEIIHMTEGRELVIPCRVTSPNITVTLKK FPLDTLIPDGKRIIWDSRKGFIISNATYKEIGLLTCEATVNGH LYKTNYLTHRQTNTIIDVVLSPSHGIELSVGEKLVLNCTARTE LNVGIDFNWEYPSSKHQHKKLVNRDLKTQSGSEMKKFLSTLTI DGVTRSDQGLYTCAASSGLMTKKNSTFVRVHEKDKTHTAPELL GGPSVFLFPPKPKDTLMISRTPEVTCVVVDVSHEDPEVKFNWY VDGVEVHNAKTKPREEQYNSTYRVVSVLTVLHQDWLNGKEYKC KVSNKALPAPIEKTISKAKGQPREPQVYTLPPSRDELTKNQVS LTCLVKGFYPSDIAVEWESNGQPENNYKTTPPVLDSDGSFFLY SKLTVDKSRWQQGNVFSCSVMHEALHNHYTQKSLSLSPGKKKP LDGEYFTLQIRGRERFEMFRELNEALELKDAQAGKEPG |
| 214 | Q88 monovalent | EVQLVESGGGLVQPGGSLRLSCAASGFTFSDYWMYWVRQAPGK GLEWVSEINTNGLITKYPDSVKGRFTISRDNAKNTLYLQMNSL RPEDTAVYYCARSPSGFNRGQGTLVTVSS |
| 215 | Q88 tetravalent | EVQLVESGGGLVQPGGSLRLSCAASGFTFSDYWMYWVRQAPGK GLEWVSEINTNGLITKYPDSVKGRFTISRDNAKNTLYLQMNSL RPEDTAVYYCARSPSGFNRGQGTLVTVSSKKKPLDGEYFTLQI RGRERFEMFRELNEALELKDAQAGKEPG |
| 216 | Q88 octavalent | EVQLVESGGGLVQPGGSLRLSCAASGFTFSDYWMYWVRQAPGK GLEWVSEINTNGLITKYPDSVKGRFTISRDNAKNTLYLQMNSL RPEDTAVYYCARSPSGFNRGQGTLVTVSSKKKPLDGEYFTLQI RGRERFEMFRELNEALELKDAQAGKEPGEVQLVESGGGLVQPG GSLRLSCAASGFTFSDYWMYWVRQAPGKGLEWVSEINTNGLIT KYPDSVKGRFTISRDNAKNTLYLQMNSLRPEDTAVYYCARSPS GFNRGQGTLVTVSS |
| 217 | Q142 | EVQLVESGGGLVQPGGSLRLSCAASGFTFSDYWMYWVRQAPGK GLEWVSEINTNGLITKYPDSVKGRFTISRDNAKNTLYLQMNSL RPEDTAVYYCARSPSGFNRGQGTLVTVSSGGSGGSEVQLVESG GGLVQPGGSLRLSCAASGFTFSDYWMYWVRQAPGKGLEWVSEI NTNGLITKYPDSVKGRFTISRDNAKNTLYLQMNSLRPEDTAVY YCARSPSGFNRGQGTLVTVSSGGGGSGGGGSASTKGPSVFPLA PSSKSTSGGTAALGCLVKDYFPEPVTVSWNSGALTSGVHTFPA VLQSSGLYSLSSVVTVPSSSLGTQTYICNVNHKPSNTKVDKKV EPKSCDKTHTKKKPLDGEYFTLQIRGRERFEMFRELNEALELK DAQAGKEPG |
| 218 | Q135 | EVQLVESGGGLVQPGGSLRLSCAASGFTFSDYWMYWVRQAPGK GLEWVSEINTNGLITKYPDSVKGRFTISRDNAKNTLYLQMNSL RPEDTAVYYCARSPSGFNRGQGTLVTVSSGGGGSGGGGSGQPK AAPSVTLFPPSSEELQANKATLVCLISDFYPGAVTVAWKADSS PVKAGVETTTPSKQSNNKYAASSYLSLTPEQWKSHRSYSCQVT HEGSTVEKTVAPTECS |
| 219 | Q136 | EVQLVESGGGLVQPGGSLRLSCAASGFTFSDYWMYWVRQAPGK GLEWVSEINTNGLITKYPDSVKGRFTISRDNAKNTLYLQMNSL RPEDTAVYYCARSPSGFNRGQGTLVTVSSGGGGSGGGGSKRTV AAPSVFIFPPSDEQLKSGTASVVCLLNNFYPREAKVQWKVDNA LQSGNSQESVTEQDSKDSTYSLSSTLTLSKADYEKHKVYACEV THQGLSSPVTKSFNRGEC |
| 220 | Q144 | EVQLVESGGGLVQPGGSLRLSCAASGFTFSDYWMYWVRQAPGK GLEWVSEINTNGLITKYPDSVKGRFTISRDNAKNTLYLQMNSL RPEDTAVYYCARSPSGFNRGQGTLVTVSSGGSGGSEVQLVESG GGLVQPGGSLRLSCAASGFTFSDYWMYWVRQAPGKGLEWVSEI NTNGLITKYPDSVKGRFTISRDNAKNTLYLQMNSLRPEDTAVY YCARSPSGFNRGQGTLVTVSSGGGGSGGGGSGQPKAAPSVTLF |
| | | PPSSEELQANKATLVCLISDFYPGAVTVAWKADSSPVKAGVET TTPSKQSNNKYAASSYLSLTPEQWKSHRSYSCQVTHEGSTVEK TVAPTECS |
| 221 | Q145 | EVQLVESGGGLVQPGGSLRLSCAASGFTFSDYWMYWVRQAPGK GLEWVSEINTNGLITKYPDSVKGRFTISRDNAKNTLYLQMNSL RPEDTAVYYCARSPSGFNRGQGTLVTVSSGGSGGSEVQLVESG GGLVQPGGSLRLSCAASGFTFSDYWMYWVRQAPGKGLEWVSEI NTNGLITKYPDSVKGRFTISRDNAKNTLYLQMNSLRPEDTAVY YCARSPSGFNRGQGTLVTVSSGGGGSGGGGSKRTVAAPSVFIF PPSDEQLKSGTASVVCLLNNFYPREAKVQWKVDNALQSGNSQE SVTEQDSKDSTYSLSSTLTLSKADYEKHKVYACEVTHQGLSSP VTKSFNRGEC |
| 222 | Avelumab Fab monomeric Ig Quad (Heavy Chain) | EVQLLESGGGLVQPGGSLRLSCAASGFTFSSYIMMWVRQAPGK GLEWVSSIYPSGGITFYADTVKGRFTISRDNSKNTLYLQMNSL RAEDTAVYYCARIKLGTVTTVDYWGQGTLVTVSSASTKGPSVF PLAPSSKSTSGGTAALGCLVKDYFPEPVTVSWNSGALTSGVHT FPAVLQSSGLYSLSSVVTVPSSSLGTQTYICNVNHKPSNTKVD KKVEPKSCDKTHTAPELLGGPSVFLFPPKPKDTLMISRTPEVT CVVVDVSHEDPEVKFNWYVDGVEVHNAKTKPREEQYNSTYRVV SVLTVLHQDWLNGKEYKCKVSNKALPAPIEKTISKAKGQPREP QVYTLPPSRDELTKNQVSLTCLVKGFYPSDIAVEWESNGQPEN NYKTTPPVLDSDGSFFLYSKLTVDKSRWQQGNVFSCSVMHEAL HNHYTQKSLSLSPGKKKKPLDGEYFTLQIRGRERFEMFRELNE ALELKDAQAGKEPG |
| 223 | Avelumab Light Chain | QSALTQPASVSGSPGQSITISCTGTSSDVGGYNYVSWYQQHPG KAPKLMIYDVSNRPSGVSNRFSGSKSGNTASLTISGLQAEDEA DYYCSSYTSSSTRVFGTGTKVTVLGQPKANPTVTLFPPSSEEL QANKATLVCLISDFYPGAVTVAWKADGSPVKAGVETTKPSKQS NNKYAASSYLSLTPEQWKSHRSYSCQVTHEGSTVEKTVAPTEC S |
| 224 | Humira Fab monomeric Ig Quad (Heavy | EVQLVESGGGLVQPGRSLRLSCAASGFTFDDYAMHWVRQAPGK GLEWVSAITWNSGHIDYADSVEGRFTISRDNAKNSLYLQMNSL RAEDTAVYYCAKVSYLSTASSLDYWGQGTLVTVSSASTKGPSV FPLAPSSKSTSGGTAALGCLVKDYFPEPVTVSWNSGALTSGVH TFPAVLQSSGLYSLSSVVTVPSSSLGTQTYICNVNHKPSNTKV |
| | Chain) | DKKVEPKSCDKTHTAPELLGGPSVFLFPPKPKDTLMISRTPEV TCVVVDVSHEDPEVKFNWYVDGVEVHNAKTKPREEQYNSTYRV VSVLTVLHQDWLNGKEYKCKVSNKALPAPIEKTISKAKGQPRE PQVYTLPPSRDELTKNQVSLTCLVKGFYPSDIAVEWESNGQPE NNYKTTPPVLDSDGSFFLYSKLTVDKSRWQQGNVFSCSVMHEA LHNHYTQKSLSLSPGKKKKPLDGEYFTLQIRGRERFEMFRELN EALELKDAQAGKEPG |
| 179 | Humira Light Chain | DIQMTQSPSSLSASVGDRVTITCRASQGIRNYLAWYQQKPGKA PKLLIYAASTLQSGVPSRFSGSGSGTDFTLTISSLQPEDVATY YCQRYNRAPYTFGQGTKVEIKRTVAAPSVFIFPPSDEQLKSGT ASVVCLLNNFYPREAKVQWKVDNALQSGNSQESVTEQDSKDST YSLSSTLTLSKADYEKHKVYACEVTHQGLSSPVTKSFNRGEC |
| 225 | CR3022 VH-TD Quad heavy chain (Q146A) VH is underlined; p53 TD is in bold | QMQLVQSGTEVKKPGESLKISCKGSGYGFITYWIGWVRQMPGK GLEWMGIIYPGDSETRYSPSFQGQVTISADKSINTAYLQWSSL KASDTAIYYCAGGSGISTPMDVWGQGTTVTVASTKGPSVFPLA PSSKSTSGGTAALGCLVKDYFPEPVTVSWNSGALTSGVHTFPA VLQSSGLYSLSSVVTVPSSSLGTQTYICNVNHKPSNTKVDKKV EPKSCDKTHTKKKPLDGEYFTLQIRGRERFEMFRELNEALELK DAQAGKEPG |
| 226 | >CR3022 VH monomeric Ig-TD Quad heavy chain (Q146B) VH is underlined; p53 TD is in bold | QMQLVQSGTEVKKPGESLKISCKGSGYGFITYWIGWVRQMPGK GLEWMGIIYPGDSETRYSPSFQGQVTISADKSINTAYLQWSSL KASDTAIYYCAGGSGISTPMDVWGQGTTVTVASTKGPSVFPLA PSSKSTSGGTAALGCLVKDYFPEPVTVSWNSGALTSGVHTFPA VLQSSGLYSLSSVVTVPSSSLGTQTYICNVNHKPSNTKVDKKV EPKSCDKTHTAPELLGGPSVFLFPPKPKDTLMISRTPEVTCVV VDVSHEDPEVKFNWYVDGVEVHNAKTKPREEQYNSTYRVVSVL TVLHQDWLNGKEYKCKVSNKALPAPIEKTISKAKGQPREPQVY TLPPSRDELTKNQVSLTCLVKGFYPSDIAVEWESNGQPENNYK TTPPVLDSDGSFFLYSKLTVDKSRWQQGNVFSCSVMHEALHNH YTQKSLSLSPGKKKKPLDGEYFTLQIRGRERFEMFRELNEALE LKDAQAGKEPG |
| 227 | >CR3022 VH Ig-TD Quad heavy chain (Q146C) VH is underlined; p53 TD is in bold | QMQLVQSGTEVKKPGESLKISCKGSGYGFITYWIGWVRQMPGK GLEWMGIIYPGDSETRYSPSFQGQVTISADKSINTAYLQWSSL KASDTAIYYCAGGSGISTPMDVWGQGTTVTVASTKGPSVFPLA PSSKSTSGGTAALGCLVKDYFPEPVTVSWNSGALTSGVHTFPA VLQSSGLYSLSSVVTVPSSSLGTQTYICNVNHKPSNTKVDKKV EPKSCDKTHTCPPCPAPELLGGPSVFLFPPKPKDTLMISRTPE VTCVVVDVSHEDPEVKFNWYVDGVEVHNAKTKPREEQYNSTYR VVSVLTVLHQDWLNGKEYKCKVSNKALPAPIEKTISKAKGQPR EPQVYTLPPSRDELTKNQVSLTCLVKGFYPSDIAVEWESNGQP ENNYKTTPPVLDSDGSFFLYSKLTVDKSRWQQGNVFSCSVMHE ALHNHYTQKSLSLSPGKKKKPLDGEYFTLQIRGRERFEMFREL NEALELKDAQAGKEPG |
| 228 | >CR3022 VL Quad light chain (Q147) VL is underlined | DIQLTQSPDSLAVSLGERATINCKSSQSVLYSSINKNYLAWYQ QKPGQPPKLLIYWASTRESGVPDRFSGSGSGTDFTLTISSLQA EDVAVYYCQQYYSTPYTFGQGTKVEIKRTVAAPSVFIFPPSDE QLKSGTASVVCLLNNFYPREAKVQWKVDNALQSGNSQESVTEQ DSKDSTYSLSSTLTLSKADYEKHKVYACEVTHQGLSSPVTKSF NRGEC |
| 229 | >ACE2-TD (Q154A) ACE2 peptide is underlined; p53 TD is in bold | QSTIEEQAKTFLDKFNHEAEDLFYQSSLASWNYNTNITEENVQ NMNNAGDKWSAFLKEQSTLAQMYPLQEIQNLTVKLQLQALQQN GSSVLSEDKSKRLNTILNTMSTIYSTGKVCNPDNPQECLLLEP GLNEIMANSLDYNERLWAWESWRSEVGKQLRPLYEEYVVLKNE MARANHYEDYGDYWRGDYEVNGVDGYDYSRGQLIEDVEHTFEE IKPLYEHLHAYVRAKLMNAYPSYISPIGCLPAHLLGDMWGRFW TNLYSLTVPFGQKPNIDVTDAMVDQAWDAQRIFKEAEKFFVSV GLPNMTQGFWENSMLTDPGNVQKAVCHPTAWDLGKGDFRILMC TKVTMDDFLTAHHEMGHIQYDMAYAAQPFLLRNGANEGFHEAV GEIMSLSAATPKHLKSIGLLSPDFQEDNETEINFLLKQALTIV GTLPFTYMLEKWRWMVFKGEIPKDQWMKKWWEMKREIVGVVEP VPHDETYCDPASLFHVSNDYSFIRYYTRTLYQFQFQEALCQAA KHEGPLHKCDISNSTEAGQKLFNMLRLGKSEPWTLALENVVGA |
| | | KNMNVRPLLNYFEPLFTWLKDQNKNSFVGWSTDWSPYAD KKKP LDGEYFTLQIRGRERFEMFRELNEALELKDAQAGKEPG |
| 230 | > ACE2 monomeric Ig-TD (Q154A) ACE2 peptide is underlined; p53 TD is in bold | QSTIEEQAKTFLDKFNHEAEDLFYQSSLASWNYNTNITEENVQ NMNNAGDKWSAFLKEQSTLAQMYPLQEIQNLTVKLQLQALQQN GSSVLSEDKSKRLNTILNTMSTIYSTGKVCNPDNPQECLLLEP GLNEIMANSLDYNERLWAWESWRSEVGKQLRPLYEEYVVLKNE MARANHYEDYGDYWRGDYEVNGVDGYDYSRGQLIEDVEHTFEE IKPLYEHLHAYVRAKLMNAYPSYISPIGCLPAHLLGDMWGRFW TNLYSLTVPFGQKPNIDVTDAMVDQAWDAQRIFKEAEKFFVSV GLPNMTQGFWENSMLTDPGNVQKAVCHPTAWDLGKGDFRILMC TKVTMDDFLTAHHEMGHIQYDMAYAAQPFLLRNGANEGFHEAV GEIMSLSAATPKHLKSIGLLSPDFQEDNETEINFLLKQALTIV GTLPFTYMLEKWRWMVFKGEIPKDQWMKKWWEMKREIVGVVEP VPHDETYCDPASLFHVSNDYSFIRYYTRTLYQFQFQEALCQAA KHEGPLHKCDISNSTEAGQKLFNMLRLGKSEPWTLALENVVGA KNMNVRPLLNYFEPLFTWLKDQNKNSFVGWSTDWSPYADEPKS CDKTHTAPELLGGPSVFLFPPKPKDTLMISRTPEVTCVVVDVS HEDPEVKFNWYVDGVEVHNAKTKPREEQYNSTYRVVSVLTVLH QDWLNGKEYKCKVSNKALPAPIEKTISKAKGQPREPQVYTLPP SRDELTKNQVSLTCLVKGFYPSDIAVEWESNGQPENNYKTTPP VLDSDGSFFLYSKLTVDKSRWQQGNVFSCSVMHEALHNHYTQK SLSLSPGKKKKPLDGEYFTLQIRGRERFEMFRELNEALELKDA QAGKEPG |
| 231 | ACE2 Ig-TD (Q 154C) ACE2 peptide is underlined; p53 TD is in | QSTIEEQAKTFLDKFNHEAEDLFYQSSLASWNYNTNITEENVQ NMNNAGDKWSAFLKEQSTLAQMYPLQEIQNLTVKLQLQALQQN GSSVLSEDKSKRLNTILNTMSTIYSTGKVCNPDNPQECLLLEP GLNEIMANSLDYNERLWAWESWRSEVGKQLRPLYEEYVVLKNE MARANHYEDYGDYWRGDYEVNGVDGYDYSRGQLIEDVEHTFEE IKPLYEHLHAYVRAKLMNAYPSYISPIGCLPAHLLGDMWGRFW TNLYSLTVPFGQKPNIDVTDAMVDQAWDAQRIFKEAEKFFVSV GLPNMTQGFWENSMLTDPGNVQKAVCHPTAWDLGKGDFRILMC TKVTMDDFLTAHHEMGHIQYDMAYAAQPFLLRNGANEGFHEAV GEIMSLSAATPKHLKSIGLLSPDFQEDNETEINFLLKQALTIV |
| | bold | GTLPFTYMLEKWRWMVFKGEIPKDQWMKKWWEMKREIVGVVEP VPHDETYCDPASLFHVSNDYSFIRYYTRTLYQFQFQEALCQAA KHEGPLHKCDISNSTEAGQKLFNMLRLGKSEPWTLALENVVGA KNMNVRPLLNYFEPLFTWLKDQNKNSFVGWSTDWSPYADASTK GPSVFPLAPSSKSTSGGTAALGCLVKDYFPEPVTVSWNSGALT SGVHTFPAVLQSSGLYSLSSVVTVPSSSLGTQTYICNVNHKPS NTKVDKKVEPKSCDKTHTCPPCPAPELLGGPSVFLFPPKPKDT LMISRTPEVTCVVVDVSHEDPEVKFNWYVDGVEVHNAKTKPRE EQYNSTYRVVSVLTVLHQDWLNGKEYKCKVSNKALPAPIEKTI SKAKGQPREPQVYTLPPSRDELTKNQVSLTCLVKGFYPSDIAV EWESNGQPENNYKTTPPVLDSDGSFFLYSKLTVDKSRWQQGNV FSCSVMHEALHNHYTQKSLSLSPGKKKKPLDGEYFTLQIRGRE RFEMFRELNEALELKDAQAGKEPG |

TABLE 19

List of viruses that can be bound by a multimer of the invention
Virus
Adeno-associated virus
Adenovirus
African swine fever virus
Autographa californica multiple nucleopolyhedrovirus
Barmah Forest virus (BFV)
Bombyx mori nucleopolyhedrovirus
Chickenpox
Chikungunya alphavirus
Chikungunya Virus Infection
COVID-19 (Coronavirus SARS-Cov-2)
Coronavirus SARS-Cov-1
Coxsackieviruses
Cytomegalovirus (CMV)
Dengue virus (DENV)
Ebola
Enterovirus A & B
Epstein-Barr virus infection (EBV)
Hanta virus
Hantavirus Pulmonary Syndrome
Hepatitis virus (A, B, C, D or E)
Human herpesvirus 6 (HHV-6)
Human immunodeficiency virus (HIV)
Human papillomavirus
Human T- cell leukemia virus, type 1 (HTLV-1)
Infectious spleen and kidney necrosis virus
Influenza virus
Japanese encephalitis virus (JEV)
Kaposi’s sarcoma-associated herpesvirus KSHV (HHV-8)
Mayaro virus (MAYV)
Measles
Merkel cell polyomavirus
Mumps
Norovirus
O′nyong-nyong virus (ONNV)
Orthmyxoviruse s
Paramyxoviruses
Poliovirus
Rrabies
Respiratory syncytial virus
Retroviruses
Rhabdoviruses
Ross River virus (RRV)
Rubella
Severe acute respiratory syndrome (SARS)
Shingles
Simian immunodeficiency virus (SIV)
Simian varicella virus (SVV)
Simian Virus 40
Sindbis virus (SINV)
Singapore grouper iridovirus
Smallpox
Vaccinia virus
Varicella-zoster virus (VZV)
Vesicular stomatitis virus
West Nile virus (WNV)
Zika virus (ZIKV)

TABLE 20

List of example cell surface antigens on host cells or the surface of viruses that could be specifically bound by a multimer of the invention, eg, to block attachment onto and/or entry into host cells
Targets to block virus attachment/entry into host cells
CCR5
CCR5
CD21
CD4
CD46
CD80
CD86
Coxsackie-adenovirus receptor
CR2
CXCR4
DC-SIGN
DC-SIGNR
EGFR
G protein to cell surface receptors
GD1a glycan
Glycoproteins gB, gC, gD, gH and gL
Glycosaminoglycan
gp120
Hemagglutinin (HA1 and HA2)
Heparan sulphate
Heparan sulphate proteoglycans
Human mannose receptor C-type 1
Integrin α3β1
Integrins
Mannose-6-phosphate receptor
MHC1-α2
Myelin-associated glycoprotein
N-acetilneuraminic acid receptor
Nucleolin
Paired immunoglobulin-like receptor alpha
Phosphatidylserine
Proteoglycans
RIG-I
Sialic acid sugars and glycolipids
Surface heparan sulphate
TLR-2
TLR-3
TLR-7
TLR9
VCAM-1
xCT
αvβ3- and αvβ5-integrins
β1 and β3 integrins

### Table 21: Example Sources of Binding Sites for Multimers

[2547] (a) Taken from Trends Immunol. 2020 Apr 24, doi: 10.1016/j.it.2020.04.008, “Neutralizing Antibodies against SARS-CoV-2 and Other Human Coronaviruses”, Trends in Immunology 41, 355-359; 2020, Shibo Jiang, Christopher Hillyer, and Lanying Du, which is incorporated herein in its entirety by reference (including the references cited therein (to which the numbers in the last column of this table refers) and antibody and V domain sequences therein).

| Ab name | Source | Neutralizing activity | Neutralizing | Protective efficacy | Refs^{b} |
|---|---|---|---|---|---|
| S230.15 m396 mAbs | Human | Neutralize human (strains GD03, Urbani, Tor2) and palm civet (strains SZ3, 5Z16) SARS-CoV infection | Recognize epitopes (residues 408, 442, 443, 460, 475) on SARS-CoV S1 protein, interfering with RBD-ACE2 | Protect mice against challenge of SARS-CoV (strains Urbani, rGD03, or rSZ16) | [9] |
| S109.8 S227.14 S230.15 mAbs | Human | Neutralize human (Urbani, GZ02, CUHK-W1), palm civet (HC/SZ/61/03), and raccoon dog (A031G) SARS-CoV infectious clones containing S variants | Inhibit the binding of SARS-CoV RBD-ACE2 receptor | Protect mice against challenge of SARS-CoV infectious clones (Urbani, GZ02, HC/SZ/61/03) or mouse-adapted strain (MA15) | [10] |
| 80R scFv, mAb | Human | Neutralize live SARS-CoV (strain Urbani) infection | Recognize epitopes on SARS-CoV S1 (residues 261-672), blocking RBD-ACE2 binding and inhibiting syncytium formation | NA | [11] |
| CR3022 CR3014 scFv, mAb | Human | Neutralize live SARS-CoV (strain HKU-39849) infection; CR3022 could neutralize CR3014 escape variants | Recognize epitopes on SARS-CoV RBD (residues 318-510); CR3022 binds SARS-CoV-2 RBD with high affinity | CR3014 protects ferrets against SARS-CoV (strain HKU-39849) infection | [13] |
| 33G4 35B5 30F9 mAbs | Mouse | Neutralize human (strains GD03, Tor2) and palm civet (SZ3) pseudotyped SARS-CoV infection | Recognize epitopes on SARS-CoV RBD, blocking RBD-ACE2 receptor binding | NA | [12] |
| MERS-27 m336 MERS-GD27 MCA1 mAbs, Fabs | Human | Neutralize divergent strains ofpseudotyped and live (strain EMC2012) MERS-CoV infection | Recognize a number of key epitopes on MERS-CoV RBD protein, blocking RBD-DPP4 receptor binding | Prophylactically and therapeutically prevent and treat MERS-CoV (strain EMC2012) challenge in hDPP4-Tg mice, rabbits, or common marmosets | [3,8] |

### Table 21 Continued

[2548] (b) DNA sequences encoding the VH and VL of VH/VL binding sites for Anti-SARS-CoV-2 antigen (eg, spike); VH-IHI pairs with VL-IHI; VH-IHG pairs with VL-IHG, etc. VH-IHI (SEQ ID NO: 295):

CAGGTGCAGCTGGTGCAGTCTGGGGCTGAGGTGAAGAAGCCTGGGGCCTC
AGTGAAGGTCTCCTGCAAGGCTTCTGGATACATCTTCACCGGCTACTATA
TGCACTGGGTGCGACAGGCCCCTGGACAGGGGCTTGAGTGGATGGGATGG
ATCAACCCTAACAGTGGTGGCGCAAACTATGCACAGAAGTTTCAGGGCAG
GGTCACCCTGACCAGGGACACGTCCATCACCACAGTCTACATGGAACTGA
GCAGGCTGAGATTTGACGACACGGCCGTGTATTACTGTGCGAGAGGATCC
CGGTATGACTGGAACCAGAACAACTGGTTCGACCCCTGGGGCCAGGGAAC
CCTGGTCACCGTCTCCTCA

VL-IHI (SEQ ID NO: 296):

CAGTCTGCCCTGACTCAGCCTGCCTCCGTGTCTGGGTCTCCTGGACAGTC
GATCACCATCTCCTGCACTGGAACCAGCAGTGACGTTGGTACTTATAACT
ATGTCTCCTGGTACCAACAACACCCAGGCAAAGCCCCCAAACTCATGATT
TTTGATGTCAGTAATCGGCCCTCAGGGGTTTCTGATCGCTTCTCTGGCTC
CAAGTCTGGCAACACGGCCTCCCTGACCATCTCTGGGCTCCAGGCTGAGG
ACGAGGCTGATTATTACTGCAGCTCATTTACAACCAGCAGCACTGTGGTT
TTCGGCGGAGGGACCAAGCTGACCGTCCTA

VH-IHG (SEQ ID NO: 297):

CAGGTGCAGCTGGTGGAGTCTGGGGGAGGCGTGGTCCAGCCTGGGAGGTC
CCTGAGACTCTCCTGTGCAGCCTCTGGATTCACCTTCAGTAACTATGCTA
TGTACTGGGTCCGCCAGGCTCCAGGCAAGGGGCTGGAGTGGGTGGCAGTT
ATATCATATGATGGAAGTAATAAATACTATGCAGACTCCGTGAAGGGCCG
ATTCACCATCTCCAGAGACAATTCCAAGAACACGCTGTATCTGCAAATGA
ACAGCCTGAGAACTGAGGACACGGCTGTGTATTACTGTGCGAGTGGCTCC
GACTACGGTGACTACTTATTGGTTTACTGGGGCCAGGGAACCCTGGTCAC
CGTCTCCTCA

VL-IHG (SEQ ID NO: 298):

CAGTCTGCCCTGACTCAGCCTGCCTCCGTGTCTGGGTCTCCTGGACAGTC
GATCACCATCTCCTGCACTGGAACCAGCAGTGACGTTGGTGGTTATAACT
ATGTCTCCTGGTACCAACAACACCCAGGCAAAGCCCCCAAACTCATGATT
TATGATGTCAGTAAGCGGCCCTCAGGGGTTTCTAATCGCTTCTCTGGCTC
CAAGTCTGGCAACACGGCCTCCCTGACCATCTCTGGGCTCCAGTCTGAGG
ACGAGGCTGATTATTACTGCAACTCTTTGACAAGCATCAGCACTTGGGTG
TTCGGCGGAGGGACCAAGCTGACCGTCCTA

VH-ICC (SEQ ID NO: 299):

CAGGTGCAGCTGGTGGAGTCTGGGGGAGGCTTGGTCAAGCCTGGAGGGTC
CCTGAGACTCTCCTGTGCAGCCTCTGGATTCACCTTCAGTGACTACTACA
TGAGCTGGATCCGCCAGGCTCCAGGGAAGGGGCTGGAGTGGGTTTCATAC
ATTACTTATAGTGGTAGTACCATATACTACGCAGACTCTGTGAAGGGCCG
ATTCACCATCTCCAGGGACAACGCCAAGAGCTCACTGTATCTGCAAATGA
ACAGCCTGAGAGCCGAGGACACGGCCGTGTATTACTGTGCGAGAGATCGC
GGTACAACTATGGTCCCCTTTGACTACTGGGGCCAGGGAACCCTGGTCAC
CGTCTCCTCA

VL-ICC (SEQ ID NO: 300):

GACATCCAGATGACCCAGTCTCCATCCTCCCTGTCTGCATCTGTAGGAGA
CAGAGTCACCATCACTTGCCAGGCGAGTCAGGACATTACCAACTATTTAA
ATTGGTATCAGCAGAAACCAGGGAAAGCCCCTAAGCTCCTGATCTACGCT
GCATCCAATTTGGAAACAGGGGTCCCATCAAGGTTCAGTGGAAGTGGATC
TGGGACAGATTTTACTTTCACCATCAGCGGCCTGCAGCCTGAAGATATTG
CAACATATTACTGTCAACAGTATGATAATCTCCCTCTCACTTTCGGCGGA
GGGACCAAGGTGGAGATCAAA

VH-ICD (SEQ ID NO: 301):

GAGGTGCAGCTGGTGGAGTCTGGGGGAGGCTTGGTAAAGCCTGGGGGGTC
CCTTAGACTCTCCTGTGCAGCCTCTGGAATCACTTTCAGTAACGCCTGGA
TGAGTTGGGTCCGCCAGGCTCCAGGGAAGGGGCTGGAGTGGGTTGGCCGT
ATTAAAAGCAAAACTGATGGTGGGACAACAGACTACGCCGCACCCGTGAA
AGGCAGATTCACCATCTCAAGAGATGATTCAAAAAACACGCTGTATCTAC
AAATGAACAGCCTGAAAACCGAGGACACAGCCGTGTATTACTGTACCACA
GCGAGGTGGGACTGGTACTTCGATCTCTGGGGCCGTGGCACCCTGGTCAC
TGTCTCCTCA

VL-ICD (SEQ ID NO: 302):

GACATCCAGATGACCCAGTCTCCATCCTCCCTGTCTGCATCTGTAGGAGA
CAGAGTCACCATCACTTGCCAGGCGAGTCAGGACATTTGGAATTATATAA
ATTGGTATCAGCAGAAACCAGGGAAGGCCCCTAAGCTCCTGATCTACGAT
GCATCCAATTTGAAAACAGGGGTCCCATCAAGGTTCAGTGGAAGTGGATC
TGGGACAGATTTTACTTTCACCATCAGCAGCCTGCAGCCTGAAGATATTG
CAACATATTACTGTCAACAGCATGATGATCTCCCTCCGACCTTCGGCCAA
GGGACCAAGGTGGAAATCAAA

VH-IGG (SEQ ID NO: 303):

CAGGTGCAGCTGGTGCAGTCTGGGGCTGAGGTGAAGAAGCCTGGGTCCTC
GGTGAAGGTCTCCTGCAAGGCTTCTGGAGGCACCTTCAGCAGCTATGCTA
TCACCTGGGTGCGACAGGCCCCTGGACAAGGGCTTGAGTGGATGGGAAGG
ATCATCCCTATGTTTGGTATAGCAAACTACGCACAGAAGTTCCAGGGCAG
AGTCACGATTACCGCGGACAAATCCACGAGCACAGCCTACATGGAGGTGA
GCAGCCTGAGATCTGAGGACACGGCCGTGTATTACTGTGCGAGAACACCG
TTTTACTATGATAGTAGTGGTTATTACCTTGACTACTGGGGCCAGGGAAC
CCTGGTCACCGTCTCCTCA

VL-IGG (SEQ ID NO: 304):

GAAATTGTGTTGACGCAGTCTCCAGGCACCCTGTCTTTGTCTCCAGGGGA
AAGAGCCACCCTCTCTTGCAGGGCCAGTCAGAGTGTTAGCAGCAACTACT
TAGCCTGGTACCAGCAGAGTCCTGGCCAGGCTCCCAGGCTCCTCATCTAT
GGTGCATCCAGCAGGGCCACTGGCATCCCAGACAGGTTCAGTGGCAGTGG
GTCTGGGACAGACTTCACTCTCACCATCAGCAGACTGGAGCCTGAAGATT
TTGCAGTTTATTACTGTCAGCAGTATGTTAGGTCACCCCGGACGTTCGGC
CAAGGGACCAAGGTGGAAATCAAA

VH-IFD (SEQ ID NO: 305):

CAGGTGCAGCTGCAGGAGTCGGGCCCAGGACTGGTGAAGCCTTCGGAGAC
CCTGTCCCTCACCTGCACTGTCTCTGGTGGCTCCATCAATAATTACTACT
GGATCTGGATCCGGCAGCCCCCAGGGAAGGGACTGGAGTGGATTGGGTAT
ATCTATCACAGTGGGAGCACCAACTACAACCCCTCCCTCAAGAGTCGAGT
CACCATATCAGTAGACACGTCCAAGAACCAATTCTCCCTGAAGGTGAGCT
CTGTGACCGCTGCGGACACGGCCGTGTATTACTGTGCGAATATGGTTCGG
GGAGTTTATGAAGATGACTACTGGGGCCAGGGAACCCTGGTCACCGTCTC
CTCA

VL-IFD (SEQ ID NO: 306):

GACATCCAGATGACCCAGTCTCCATCCTCCCTGTCTGCATCTGTAGGAGA
CAGAGTCACCATCACTTGCCGGGCAAGTCAGAGCATTAGCAACTATTTAA
ATTGGTATCAGCAGAAACCAGGGAAAGCCCCTAAGCTCCTGATCTTTGCT
GCCTCCAGTTTGCGAAGTGGGGTCCCATCAAGGTTCAGTGGCAGTGGATC
TGGGACAGATTTCACTCTCACCATCAGCAGTCTGCACCCTGAAGATTTTG
CAACTTACTACTGTCAACAGAATTACAATACCCCCCTCACTTTCGGCCCT
GGGACCAAAGTGGATATCAAA

VH-IED (SEQ ID NO: 308):

GAGGTGCAGCTGGTGGAGTCTGGGGGAGGCTTGGTCCAGCCTGGGGGGTC
ACTGAGACTCTCCTGTGCAGCCTCTGGAATCACCGTCAGTAGCAACTACA
TGAGCTGGGTCCGCCAGGCTCCAGGGAAGGGGCTGGAGTGGGTCTCACTT
ATTTATAGTGGTGGTAGCACATACTACGCAGACTCCGTGAAGGGCAGATT
CACCATCTCCAGAGACAATTCCAAGAACACGCTGTATCTTCAAATGAACA
GCCTGAGAGTCGAGGACACGGCTGTGTATTACTGTGCGAGAGATCACGGT
ATGGCAGCAGCGGGGTATAATTACTGGGGCCAGGGAACCCTGGTCACCGT
CTCCTCA

VL-IED (SEQ ID NO: 309):

GACATCCAGATGACCCAGTCTCCATCCTCCCTGTCTGCGTCTGTAGGAGA
CAGAGTCACCATCACTTGCCAGGCGAGTCAGGACATTAACAAATATTTAA
ATTGGTATCAGCAGAAACCAGGGAAAGCCCCTAAGCTCCTGATCTACGAT
GCATCCAATTTGGAAACAGGGGTCCCATCAAGGTTCAGTGGAAGTGGATC
TGGGACAGATTTTACTTTCACCATCAACAGCCTGCAGCCTGAAGATTTTG
CAACATATTTCTGTCAACAGTATGATAATCTCCCTCCAGCGTTCGGCCAA
GGGACCAAGGTGGAAATCAAA

VH-IHD (SEQ ID NO: 310):

GAGGTGCAGCTGGTGGAGTCTGGGGGAGGCTTGGTCCAGCCTGGGGGGTC
CCTGAGACTCTCCTGTGCAGCCTCTGGACTCACCGTCAATCGCAACTACA
TGAGCTGGGTCCGCCAGGCTCCAGGGAAGGGGCTGGAGTGGGTCTCACTT
ATTTATAGCGGTGGTAGCACATACTACGCAGACTCCGTTAAGGGCCGATT
CACCATCTCCAGAGACAATTCCAAGAACACGCTGTATCTTCAAATGAACA
GCCTGAGACTTGAGGACACGGCTGTGTATTACTGTGCGAGAGGTGAACTG
GGGATCCCCTACGGTATGGACGTCTGGGGCCAAGGGACCACGGTCACCGT
CTCCTCA

VL-IHD (SEQ ID NO: 311):

CAGTCTGTGTTGACGCAGCCGCCCTCAGTGTCTGCGGCCCCAGGACAGAA
GGTCACCATCTCCTGCTCTGGAAGCAGCTCCAACATTGGGAATAATTATG
TATCCTGGTACCAGCAGCTCCCAGGAACAGCCCCCAAACTCCTCATTTAT
GACAATAATAAGCGACCCTCAGGGATTCCTGACCGCTTCTCTGGCTCCAA
GTCTGGCACGTCAGCCACCCTGGGCATCACCGGACTCCAGACTGGGGACG
AGGCCGATTATTACTGCGGAACATGGGATAGCAGCCTGAGTGCTGGGGTG
TTCGGCGGAGGGACCAAGCTGACCGTCCTA

VH-IHF (SEQ ID NO: 312):

GAGGTGCAGCTGGTGGAGTCTGGGGGAGGCTTGGTCCAGCCTGGGGGGTC
CCTGAGACTCTCCTGTGCAGCCTCTGAATTCACCGTCAGTAGCAACTACA
TGAGCTGGGTCCGCCAGGCTCCAGGGAAGGGGCTAGAGTGGGTCTCAGTT
ATTTATAGCGGTGGTAGCACATTTTACGCAGACTCCGTGAAGGGCAGATT
CACCATCTCCAGAGACAATTCCAAGAACACGTTGTATCTTCAAATGAACA
GTCTGAGAGCCGAGGACACGGCTGTATATTACTGTGCGAGAGCTCTTCCC
TACGGTGACTTGCATTTTGACTACTGGGGCCAGGGAACCCTGGTCACCGT
CTCCTCA

VL-IHF (SEQ ID NO: 313):

CAGTCTGTGCTGACGCAGCCGCCCTCAGTGTCTGGGGCCCCAGGGCAGAG
GGTCACCATCTCCTGCACTGGGAGCAGCTCCAACATCGGGACAGGTTATG
ATGTACACTGGTACCAGCAGCTTCCAGGAACAGCCCCCAAACTCCTCATC
TATGGTAACACCAATCGGCCCTCAGGGGTCCCTGACCGATTCTCTGGCTC
CAAGTCTGGCACCTCAGCCTCCCTGGCCATCACTGGGCTCCAGGCTGAGG
ATGAGGCTGATTATTACTGCCAGTCCTATGACAGCAGCCTGAGTGACTCT
TATGTCTTCGGAACTGGGACCAAGGTCACCGTCCTA

TABLE 22

Examples of affinity tags and their amino acid sequence and ligand

| | | |
|---|---|---|
| Affinity Tag | Tag Sequence | Ligand |
| Poly His (6xHis) (SEQ ID NO: 314) | HHHHHH | Ni²⁺ NTA, CO²⁺CMA |
| Poly His (8xHis) (SEQ ID NO: 315) | HHHHHHHH | |
| Poly His (10xHis) (SEQ ID NO: 316) | HHHHHHHHHH | |
| HAT (SEQ ID NO: 317) | KDHLIHVHLEEHAHAHNK | CO²⁺ CMA |
| FLAG (SEQ ID NO: 318) | DYKDDDDK | mAb M1, M2 |
| c-myc (SEQ ID NO: 319) | EQKLISEEDL | mAb 9E10 |
| T7 (SEQ ID NO: 320) | MASMTGGQQMG | Anti-T7 9E10 |
| S-tag (SEQ ID NO: 321) | KETAAAKFERGHMDS | S-protein |
| Calmodulin-binding protein (SEQ ID NO: 322) | KRRWKKNFIAVSAANRFKKISSSGAL | S-protein Calmodulin |
| Bio tag (SEQ ID NO: 323) | LGIFEAMKMEWR | Streptavidin/Avidin |
| Strep-tag (SEQ ID NO: 324) | SAWRHPQFGG | Streptavidin |
| Strep-tag II (SEQ ID NO: 325) | WHPQFEK | Streptavidin-Tactin |
| Avi tag (SEQ ID NO: 326) | GLNDIFEAQKIEWHE | Streptavidin/Avidin |
| Nanotag (SEQ ID NO: 327) | DVEAWLGAR | Streptavidin/Avidin |
| Poly-Arg (R) | 5-16 amino acids | Anionic resins |
| Poly-Asp (D) | 5-16 amino acids | Cationic resins |
| Poly-Cys (C) | 2-10 amino acids | Thiopropyl Sepharose |
| Poly-Phe (F) | 5-16 amino acids | IEC |
| Glu (E) | 1 amino acid | Cationic resins |

[2549] Table 23. Amino acid sequences of anti-SARS-CoV/anti-SARS-CoV-2 in various formats for capturing and/or neutralizing SARS-CoV, SARS-CoV-2 and other related coronavirus strains. Each of the sequences outlined in this table can be further generated with or without a N- or C-terminus affinity tag as outlined in Table 22. The tetramerization domain (TD) is preferably TD from p53 but not limited by it. CR3006, CR3013, CR3014 and CR3022 are example antibody sequences for anti-SARS-CoV and CoV-2 strains. Other anti-SARS-CoV/anti-SARS-CoV-2 could be composed of single domain antibodies (dAb) such as those from camelid. Examples of anti-SARS-CoV/anti-SARS-CoV-2 dAb include QB-DD and QB-GB formatted into different Quad formats as shown in FIGS. 6A-D). Additional examples of anti-SARS-CoV/anti-SARS-CoV-2 Quads could include peptides that target and/or inhibit virus-host membrane fusion such as EK1C4 formatted into different Quad formats as shown in FIGS. 6A-D. In further examples, other anti-SARS-CoV and CoV-2 IgG antibodies can be formatted into the different formats exemplified this table or schematically shown in FIGS. 4A-C.

[2550] The sequences of binding domains (eg, VH and VL) for use in the present invention are underlined and are intended to be read as written (ie, as part of the full sequence including non-underlined part) or alternatively without the futher underlined sequence.

[2551] In an embodiment, the polypeptide of the invention comprises a sequence that is shown in bold in this Table 23. In an embodiment, the polypeptide of the invention comprises, in N- to C-terminal direction, a binding domain or peptide; and a sequence that is shown in bold in this Table 23. The binding domain may be any binding domain disclosed herein, eg, a VH, VL, VHH, dAb or scFv.

[2552] The present disclosure further comprises each underlined sequence without the following bold sequence, eg, to provide a binding site or domain for use in any polypeptide or mutimer of the invention herein. The present disclosure further comprises each bold sequence without the immediately preceding underlined sequence, eg, to for use in any polypeptide or mutimer of the invention herein (such as as part of a polypeptide comprising a binding domain or peptide immediately preceding the bold sequence).

| | |
|---|---|
| Name | Sequence |
| CR3006 VH IgG (SEQ ID NO: 328) | EVQLVESGGGLVQPGGSLRLSCAASGFTFSGYPMHWVRQAPGKGLEWVA VISYDGSNKYYADSVKGRFTISRDNSKNTLYLQMNSLRAEDTAVYYCAK DGSPRTPSFDYWGQGTLVTV ASTKGPSVFPLAPSSKSTSGGTAALGCLV KDYFPEPVTVSWNSGALTSGVHTFPAVLQSSGLYSLSSVVTVPSSSLGT QTYICNVNHKPSNTKVDKKVEPKSCDKTHTCPPCPAPELLGGPSVFLFP PKPKDTLMISRTPEVTCVVVDVSHEDPEVKFNWYVDGVEVHNAKTKPRE EQYNSTYRVVSVLTVLHQDWLNGKEYKCKVSNKALPAPIEKTISKAKGQ PREPQVYTLPPSRDELTKNQVSLTCLVKGFYPSDIAVEWESNGQPENNY |
| | KTTPPVLDSDGSFFLYSKLTVDKSRWQQGNVFSCSVMHEALHNHYTQKS LSLSPG |
| CR3006 VL kappa (SEQ ID NO: 329) | DIQMTQSPHSLSASVGDRVTITCRASQGISNYLAWYQQKPGKVPKLLIY AASTLQSGVPSRFSGSGSGTDFTLTISSLQPEDVGVYYCQQRFRTPVTF GQGTKLEIK RTVAAPSVFIFPPSDEQLKSGTASWCLLNNFYPREAKVQ WKVDNALQSGNSQESVTEQDSKDSTYSLSSTLTLSKADYEKHKVYACEV THQGLSSPVTKSFNRGEC |
| CR3006 VH-Fab-TD (SEQ ID NO: 330) | EVQLVESGGGLVQPGGSLRLSCAASGFTFSGYPMHWVRQAPGKGLEWVA VISYDGSNKYYADSVKGRFTISRDNSKNTLYLQMNSLRAEDTAVYYCAK DGSPRTPSFDYWGQGTLVTV ASTKGPSVFPLAPSSKSTSGGTAALGCLV KDYFPEPVTVSWNSGALTSGVHTFPAVLQSSGLYSLSSVVTVPSSSLGT QTYICNVNHKPSNTKVDKKVEPKSCDKTHTKKKPLDGEYFTLQIRGRER FEMFRELNEALELKDAQAGKEPG |
| CR3006 VH Fab monomeric Ig TD (SEQ ID NO: 331) | EVQLVESGGGLVQPGGSLRLSCAASGFTFSGYPMHWVRQAPGKGLEWVA VISYDGSNKYYADSVKGRFTISRDNSKNTLYLQMNSLRAEDTAVYYCAK DGSPRTPSFDYWGQGTLVTV ASTKGPSVFPLAPSSKSTSGGTAALGCLV KDYFPEPVTVSWNSGALTSGVHTFPAVLQSSGLYSLSSVVTVPSSSLGT QTYICNVNHKPSNTKVDKKVEPKSCDKTHTAPELLGGPSVFLFPPKPKD TLMISRTPEVTCVWDVSHEDPEVKFNWYVDGVEVHNAKTKPREEQYNS TYRVVSVLTVLHQDWLNGKEYKCKVSNKALPAPIEKTISKAKGQPREPQ VYTLPPSRDELTKNQVSLTCLVKGFYPSDIAVEWESNGQPENNYKTTPP VLDSDGSFFLYSKLTVDKSRWQQGNVFSCSVMHEALHNHYTQKSLSLSP GKKKKPLDGEYFTLQIRGRERFEMFRELNEALELKDAQAGKEPG |
| CR3006 VH Fab Ig TD (SEQ ID NO: 332) | EVQLVESGGGLVQPGGSLRLSCAASGFTFSGYPMHWVRQAPGKGLEWVA VISYDGSNKYYADSVKGRFTISRDNSKNTLYLQMNSLRAEDTAVYYCAK DGSPRTPSFDYWGQGTLVTV ASTKGPSVFPLAPSSKSTSGGTAALGCLV KDYFPEPVTVSWNSGALTSGVHTFPAVLQSSGLYSLSSVVTVPSSSLGT QTYICNVNHKPSNTKVDKKVEPKSCDKTHTCPPCPAPELLGGPSVFLFP PKPKDTLMISRTPEVTCVVVDVSHEDPEVKFNWYVDGVEVHNAKTKPRE EQYNSTYRVVSVLTVLHQDWLNGKEYKCKVSNKALPAPIEKTISKAKGQ PREPQVYTLPPSRDELTKNQVSLTCLVKGFYPSDIAVEWESNGQPENNY KTTPPVLDSDGSFFLYSKLTVDKSRWQQGNVFSCSVMHEALHNHYTQKS LSLSPGKKKKPLDGEYFTLQIRGRERFEMFRELNEALELKDAQAGKEPG |
| CR3006 scFv | EVQLVESGGGLVQPGGSLRLSCAASGFTFSGYPMHWVRQAPGKGLEWVA VISYDGSNKYYADSVKGRFTISRDNSKNTLYLQMNSLRAEDTAVYYCAK DGSPRTPSFDYWGQGTLVTVGGGGSGGGGSGGGGSDIQMTQSPHSLSAS VGDRVTITCRASQGISNYLAWYQQKPGKVPKLLIYAASTLQSGVPSRFS |
| | GSGSGTDFTLTISSLQPEDVGVYYCQQRFRTPVTFGQGTKLEIK |
| CR3006 scFv-TD (SEQ ID NO: 333) | EVQLVESGGGLVQPGGSLRLSCAASGFTFSGYPMHWVRQAPGKGLEWVAVISYDGSNKYYADSVKGRFTISRDNSKNTLYLQMNSLRAEDTAVYYCAKDGSPRTPSFDYWGQGTLVTVGGGGSGGGGSGGGGSDIQMTQSPHSLSAS VGDRVTITCRASQGISNYLAWYQQKPGKVPKLLIYAASTLQSGVPSRFS GSGSGTDFTLTISSLQPEDVGVYYCQQRFRTPVTFGQGTKLEIK KKKPL DGEYFTLQIRGRERFEMFRELNEALELKDAQAGKEPG |
| CR3006 scFv monomeric Ig-TD (SEQ ID NO: 334) | EVQLVESGGGLVQPGGSLRLSCAASGFTFSGYPMHWVRQAPGKGLEWVA VISYDGSNKYYADSVKGRFTISRDNSKNTLYLQMNSLRAEDTAVYYCAK DGSPRTPSFDYWGQGTLVTV GGGGSGGGGSGGGGSDIQMTQSPHSLSAS VGDRVTITCRASQGISNYLAWYQQKPGKVPKLLIYAASTLQSGVPSRFS GSGSGTDFTLTISSLQPEDVGVYYCQQRFRTPVTFGQGTKLEIKEPKSC DKTHTAPELLGGPSVFLFPPKPKDTLMISRTPEVTCVWDVSHEDPEVK FNWYVDGVEVHNAKTKPREEQYNSTYRWSVLTVLHQDWLNGKEYKCKV SNKALPAPIEKTISKAKGQPREPQVYTLPPSRDELTKNQVSLTCLVKGF YPSDIAVEWESNGQPENNYKTTPPVLDSDGSFFLYSKLTVDKSRWQQGN VFSCSVMHEALHNHYTQKSLSLSPGKKKKPLDGEYFTLQIRGRERFEMF RELNEALELKDAQAGKEPG |
| CR3013 VH IgG (SEQ ID NO: 335) | EVQLVESGGGLVQPGGSLRLSCAASGFTFSDHYMDWVRQAPGKGLEWVG RTRNKANSYTTEYAASVKGRFTISRDDSKNSLYLQMNSLKTEDTAVYYC AKGLTPLYFDYWGQGTLVTV ASTKGPSVFPLAPSSKSTSGGTAALGCLV KDYFPEPVTVSWNSGALTSGVHTFPAVLQSSGLYSLSSVVTVPSSSLGT QTYICNVNHKPSNTKVDKKVEPKSCDKTHTCPPCPAPELLGGPSVFLFP PKPKDTLMISRTPEVTCVVVDVSHEDPEVKFNWYVDGVEVHNAKTKPRE EQYNSTYRVVSVLTVLHQDWLNGKEYKCKVSNKALPAPIEKTISKAKGQ PREPQVYTLPPSRDELTKNQVSLTCLVKGFYPSDIAVEWESNGQPENNY KTTPPVLDSDGSFFLYSKLTVDKSRWQQGNVFSCSVMHEALHNHYTQKS LSLSPG |
| CR3013 VL kappa (SEQ ID NO: 336) | ELTQSPSSLSASVGDRVTITCRASQSISSYLNWYQQKPGKAPKLLIYAA SSLQSGVPSRFSGSGSGTDFTLTISSLQPEDFATYYCQQSYSTPPTFGQ GTKVEIK RTVAAPSVFIFPPSDEQLKSGTASVVCLLNNFYPREAKVQWK VDNALQSGNSQESVTEQDSKDSTYSLSSTLTLSKADYEKHKVYACEVTH QGLSSPVTKSFNRGEC |
| CR3013 VH-Fab-TD (SEQ ID NO: 337) | EVQLVESGGGLVQPGGSLRLSCAASGFTFSDHYMDWVRQAPGKGLEWVG RTRNKANSYTTEYAASVKGRFTISRDDSKNSLYLQMNSLKTEDTAVYYC AKGLTPLYFDYWGQGTLVTV ASTKGPSVFPLAPSSKSTSGGTAALGCLV KDYFPEPVTVSWNSGALTSGVHTFPAVLQSSGLYSLSSVVTVPSSSLGT QTYICNVNHKPSNTKVDKKVEPKSCDKTHTKKKPLDGEYFTLQIRGRER |
| | FEMFRELNEALELKDAQAGKEPG |
| CR3013 VH Fab monomeric Ig TD (SEQ ID NO: 338) | EVQLVESGGGLVQPGGSLRLSCAASGFTFSDHYMDWVRQAPGKGLEWVG RTRNKANSYTTEYAASVKGRFTISRDDSKNSLYLQMNSLKTEDTAVYYC AKGLTPLYFDYWGQGTLVTV ASTKGPSVFPLAPSSKSTSGGTAALGCLV KDYFPEPVTVSWNSGALTSGVHTFPAVLQSSGLYSLSSVVTVPSSSLGT QTYICNVNHKPSNTKVDKKVEPKSCDKTHTAPELLGGPSVFLFPPKPKD TLMISRTPEVTCVWDVSHEDPEVKFNWYVDGVEVHNAKTKPREEQYNS TYRVVSVLTVLHQDWLNGKEYKCKVSNKALPAPIEKTISKAKGQPREPQ VYTLPPSRDELTKNQVSLTCLVKGFYPSDIAVEWESNGQPENNYKTTPP VLDSDGSFFLYSKLTVDKSRWQQGNVFSCSVMHEALHNHYTQKSLSLSP GKKKKPLDGEYFTLQIRGRERFEMFRELNEALELKDAQAGKEPG |
| CR3013 VH Fab Ig TD (SEQ ID NO: 339) | EVQLVESGGGLVQPGGSLRLSCAASGFTFSDHYMDWVRQAPGKGLEWVG RTRNKANSYTTEYAASVKGRFTISRDDSKNSLYLQMNSLKTEDTAVYYC AKGLTPLYFDYWGQGTLVTV ASTKGPSVFPLAPSSKSTSGGTAALGCLV KDYFPEPVTVSWNSGALTSGVHTFPAVLQSSGLYSLSSVVTVPSSSLGT QTYICNVNHKPSNTKVDKKVEPKSCDKTHTCPPCPAPELLGGPSVFLFP PKPKDTLMISRTPEVTCVVVDVSHEDPEVKFNWYVDGVEVHNAKTKPRE EQYNSTYRVVSVLTVLHQDWLNGKEYKCKVSNKALPAPIEKTISKAKGQ PREPQVYTLPPSRDELTKNQVSLTCLVKGFYPSDIAVEWESNGQPENNY KTTPPVLDSDGSFFLYSKLTVDKSRWQQGNVFSCSVMHEALHNHYTQKS LSLSPGKKKKPLDGEYFTLQIRGRERFEMFRELNEALELKDAQAGKEPG |
| CR3013 scFv (SEQ ID NO: 340) | EVQLVESGGGLVQPGGSLRLSCAASGFTFSDHYMDWVRQAPGKGLEWVG RTRNKANSYTTEYAASVKGRFTISRDDSKNSLYLQMNSLKTEDTAVYYC AKGLTPLYFDYWGQGTLVTVGGGGSGGGGSGGGGSELTQSPSSLSASVG DRVTITCRASQSISSYLNWYQQKPGKAPKLLIYAASSLQSGVPSRFSGS GSGTDFTLTISSLQPEDFATYYCQQSYSTPPTFGQGTKVEIK |
| CR3013 scFv-TD (SEQ ID NO: 341) | EVQLVESGGGLVQPGGSLRLSCAASGFTFSDHYMDWVRQAPGKGLEWVG RTRNKANSYTTEYAASVKGRFTISRDDSKNSLYLQMNSLKTEDTAVYYC AKGLTPLYFDYWGQGTLVTVGGGGSGGGGSGGGGSELTQSPSSLSASVG DRVTITCRASQSISSYLNWYQQKPGKAPKLLIYAASSLQSGVPSRFSGS GSGTDFTLTISSLQPEDFATYYCQQSYSTPPTFGQGTKVEIKKKKPLDG EYFTLQIRGRERFEMFRELNEALELKDAQAGKEPG |
| CR3013 scFv monomeric | EVQLVESGGGLVQPGGSLRLSCAASGFTFSDHYMDWVRQAPGKGLEWVG RTRNKANSYTTEYAASVKGRFTISRDDSKNSLYLQMNSLKTEDTAVYYC AKGLTPLYFDYWGQGTLVTVGGGGSGGGGSGGGGSELTQSPSSLSASVG |
| Ig-TD (SEQ ID NO: 342) | DRVTITCRASQSISSYLNWYQQKPGKAPKLLIYAASSLQSGVPSRFSGS GSGTDFTLTISSLQPEDFATYYCQQSYSTPPTFGQGTKVEIK EPKSCDK THTAPELLGGPSVFLFPPKPKDTLMISRTPEVTCVWDVSHEDPEVKFN WYVDGVEVHNAKTKPREEQYNSTYRVVSVLTVLHQDWLNGKEYKCKVSN KALPAPIEKTISKAKGQPREPQVYTLPPSRDELTKNQVSLTCLVKGFYP SDIAVEWESNGQPENNYKTTPPVLDSDGSFFLYSKLTVDKSRWQQGNVF SCSVMHEALHNHYTQKSLSLSPGKKKKPLDGEYFTLQIRGRERFEMFRE LNEALELKDAQAGKEPG |
| CR3014 VH IgG (SEQ ID NO: 343) | EVQLVESGGGLVQPGGSLRLSCAASGFTFSDHYMDWVRQAPGKGLEWVG RTRNKANSYTTEYAASVKGRFTISRDDSKNSLYLQMNSLKTEDTAVYYC ARGISPFYFDYWGQGTLVTV ASTKGPSVFPLAPSSKSTSGGTAALGCLV KDYFPEPVTVSWNSGALTSGVHTFPAVLQSSGLYSLSSVVTVPSSSLGT QTYICNVNHKPSNTKVDKKVEPKSCDKTHTCPPCPAPELLGGPSVFLFP PKPKDTLMISRTPEVTCVVVDVSHEDPEVKFNWYVDGVEVHNAKTKPRE EQYNSTYRVVSVLTVLHQDWLNGKEYKCKVSNKALPAPIEKTISKAKGQ PREPQVYTLPPSRDELTKNQVSLTCLVKGFYPSDIAVEWESNGQPENNY KTTPPVLDSDGSFFLYSKLTVDKSRWQQGNVFSCSVMHEALHNHYTQKS LSLSPG |
| CR3014 VL kappa (SEQ ID NO: 344) | ELTQSPSSLSASVGDRVTITCRASQSISSYLNWYQQKPGKAPKLLIYAA SSLQSGVPSRFSGSGSGTDFTLTISSLQPEDFATYYCQQSYSTPPTFGQ GTKVEIK RTVAAPSVFIFPPSDEQLKSGTASWCLLNNFYPREAKVQWK VDNALQSGNSQESVTEQDSKDSTYSLSSTLTLSKADYEKHKVYACEVTH QGLSSPVTKSFNRGEC |
| CR3014 VH-Fab-TD (SEQ ID NO: 345) | EVQLVESGGGLVQPGGSLRLSCAASGFTFSDHYMDWVRQAPGKGLEWVG RTRNKANSYTTEYAASVKGRFTISRDDSKNSLYLQMNSLKTEDTAVYYC ARGISPFYFDYWGQGTLVTV ASTKGPSVFPLAPSSKSTSGGTAALGCLV KDYFPEPVTVSWNSGALTSGVHTFPAVLQSSGLYSLSSVVTVPSSSLGT QTYICNVNHKPSNTKVDKKVEPKSCDKTHTKKKPLDGEYFTLQIRGRER FEMFRELNEALELKDAQAGKEPG |
| CR3014 VH Fab monomeric Ig TD (SEQ ID NO: 346) | EVQLVESGGGLVQPGGSLRLSCAASGFTFSDHYMDWVRQAPGKGLEWVG RTRNKANSYTTEYAASVKGRFTISRDDSKNSLYLQMNSLKTEDTAVYYC ARGISPFYFDYWGQGTLVTV ASTKGPSVFPLAPSSKSTSGGTAALGCLV KDYFPEPVTVSWNSGALTSGVHTFPAVLQSSGLYSLSSVVTVPSSSLGT QTYICNVNHKPSNTKVDKKVEPKSCDKTHTAPELLGGPSVFLFPPKPKD TLMISRTPEVTCVWDVSHEDPEVKFNWYVDGVEVHNAKTKPREEQYNS TYRVVSVLTVLHQDWLNGKEYKCKVSNKALPAPIEKTISKAKGQPREPQ VYTLPPSRDELTKNQVSLTCLVKGFYPSDIAVEWESNGQPENNYKTTPP VLDSDGSFFLYSKLTVDKSRWQQGNVFSCSVMHEALHNHYTQKSLSLSP |
| | GKKKKPLDGEYFTLQIRGRERFEMFRELNEALELKDAQAGKEPG |
| CR3014 VH Fab Ig TD (SEQ ID NO: 347) | EVQLVESGGGLVQPGGSLRLSCAASGFTFSDHYMDWVRQAPGKGLEWVG RTRNKANSYTTEYAASVKGRFTISRDDSKNSLYLQMNSLKTEDTAVYYC ARGISPFYFDYWGQGTLVTV ASTKGPSVFPLAPSSKSTSGGTAALGCLV KDYFPEPVTVSWNSGALTSGVHTFPAVLQSSGLYSLSSVVTVPSSSLGT QTYICNVNHKPSNTKVDKKVEPKSCDKTHTCPPCPAPELLGGPSVFLFP PKPKDTLMISRTPEVTCVVVDVSHEDPEVKFNWYVDGVEVHNAKTKPRE EQYNSTYRVVSVLTVLHQDWLNGKEYKCKVSNKALPAPIEKTISKAKGQ PREPQVYTLPPSRDELTKNQVSLTCLVKGFYPSDIAVEWESNGQPENNY KTTPPVLDSDGSFFLYSKLTVDKSRWQQGNVFSCSVMHEALHNHYTQKS LSLSPGKKKKPLDGEYFTLQIRGRERFEMFRELNEALELKDAQAGKEPG |
| CR3014 scFv (SEQ ID NO: 348) | EVQLVESGGGLVQPGGSLRLSCAASGFTFSDHYMDWVRQAPGKGLEWVG RTRNKANSYTTEYAASVKGRFTISRDDSKNSLYLQMNSLKTEDTAVYYC ARGISPFYFDYWGQGTLVTVGGGGSGGGGSGGGGSELTQSPSSLSASVG DRVTITCRASQSISSYLNWYQQKPGKAPKLLIYAASSLQSGVPSRFSGS GSGTDFTLTISSLQPEDFATYYCQQSYSTPPTFGQGTKVEIK |
| CR3014 scFv-TD (SEQ ID NO: 349) | EVQLVESGGGLVQPGGSLRLSCAASGFTFSDHYMDWVRQAPGKGLEWVG RTRNKANSYTTEYAASVKGRFTISRDDSKNSLYLQMNSLKTEDTAVYYC ARGISPFYFDYWGQGTLVTVGGGGSGGGGSGGGGSELTQSPSSLSASVG DRVTITCRASQSISSYLNWYQQKPGKAPKLLIYAASSLQSGVPSRFSGS GSGTDFTLTISSLQPEDFATYYCQQSYSTPPTFGQGTKVEIK KKKPLDG EYFTLQIRGRERFEMFRELNEALELKDAQAGKEPG |
| CR3014 scFv monomeric Ig-TD (SEQ ID NO: 350) | EVQLVESGGGLVQPGGSLRLSCAASGFTFSDHYMDWVRQAPGKGLEWVG RTRNKANSYTTEYAASVKGRFTISRDDSKNSLYLQMNSLKTEDTAVYYC ARGISPFYFDYWGQGTLVTVGGGGSGGGGSGGGGSELTQSPSSLSASVG DRVTITCRASQSISSYLNWYQQKPGKAPKLLIYAASSLQSGVPSRFSGS GSGTDFTLTISSLQPEDFATYYCQQSYSTPPTFGQGTKVEIK EPKSCDK THTAPELLGGPSVFLFPPKPKDTLMISRTPEVTCVWDVSHEDPEVKFN WYVDGVEVHNAKTKPREEQYNSTYRVVSVLTVLHQDWLNGKEYKCKVSN KALPAPIEKTISKAKGQPREPQVYTLPPSRDELTKNQVSLTCLVKGFYP SDIAVEWESNGQPENNYKTTPPVLDSDGSFFLYSKLTVDKSRWQQGNVF SCSVMHEALHNHYTQKSLSLSPGKKKKPLDGEYFTLQIRGRERFEMFRE LNEALELKDAQAGKEPG |
| CR3022 VH IgG (SEQ ID NO: 351) | QMQLVQSGTEVKKPGESLKISCKGSGYGFITYWIGWVRQMPGKGLEWMG IIYPGDSETRYSPSFQGQVTISADKSINTAYLQWSSLKASDTAIYYCAG GSGISTPMDVWGQGTTVTV ASTKGPSVFPLAPSSKSTSGGTAALGCLVK DYFPEPVTVSWNSGALTSGVHTFPAVLQSSGLYSLSSVVTVPSSSLGTQ TYICNVNHKPSNTKVDKKVEPKSCDKTHTCPPCPAPELLGGPSVFLFPP KPKDTLMISRTPEVTCVWDVSHEDPEVKFNWYVDGVEVHNAKTKPREE QYNSTYRVVSVLTVLHQDWLNGKEYKCKVSNKALPAPIEKTISKAKGQP REPQVYTLPPSRDELTKNQVSLTCLVKGFYPSDIAVEWESNGQPENNYK TTPPVLDSDGSFFLYSKLTVDKSRWQQGNVFSCSVMHEALHNHYTQKSL SLSPG |
| CR3022 VL kappa (SEQ ID NO: 352) | DIQLTQSPDSLAVSLGERATINCKSSQSVLYSSINKNYLAWYQQKPGQP PKLLIYWASTRESGVPDRFSGSGSGTDFTLTISSLQAEDVAVYYCQQYY STPYTFGQGTKVEIK RTVAAPSVFIFPPSDEQLKSGTASWCLLNNFYP REAKVQWKVDNALQSGNSQESVTEQDSKDSTYSLSSTLTLSKADYEKHK VYACEVTHQGLSSPVTKSFNRGEC |
| CR3022 VH-Fab-TD (SEQ ID NO: 353) | QMQLVQSGTEVKKPGESLKISCKGSGYGFITYWIGWVRQMPGKGLEWMG IIYPGDSETRYSPSFQGQVTISADKSINTAYLQWSSLKASDTAIYYCAG GSGISTPMDVWGQGTTVTV ASTKGPSVFPLAPSSKSTSGGTAALGCLVK DYFPEPVTVSWNSGALTSGVHTFPAVLQSSGLYSLSSVVTVPSSSLGTQ TYICNVNHKPSNTKVDKKVEPKSCDKTHTKKKPLDGEYFTLQIRGRERF EMFRELNEALELKDAQAGKEPG |
| CR3022 VH Fab monomeric Ig TD (SEQ ID NO: 354) | QMQLVQSGTEVKKPGESLKISCKGSGYGFITYWIGWVRQMPGKGLEWMG IIYPGDSETRYSPSFQGQVTISADKSINTAYLQWSSLKASDTAIYYCAG GSGISTPMDVWGQGTTVTV ASTKGPSVFPLAPSSKSTSGGTAALGCLVK DYFPEPVTVSWNSGALTSGVHTFPAVLQSSGLYSLSSVVTVPSSSLGTQ TYICNVNHKPSNTKVDKKVEPKSCDKTHTAPELLGGPSVFLFPPKPKDT LMISRTPEVTCVVVDVSHEDPEVKFNWYVDGVEVHNAKTKPREEQYNST YRVVSVLTVLHQDWLNGKEYKCKVSNKALPAPIEKTISKAKGQPREPQV YTLPPSRDELTKNQVSLTCLVKGFYPSDIAVEWESNGQPENNYKTTPPV LDSDGSFFLYSKLTVDKSRWQQGNVFSCSVMHEALHNHYTQKSLSLSPG KKKKPLDGEYFTLQIRGRERFEMFRELNEALELKDAQAGKEPG |
| CR3022 VH Fab Ig TD (SEQ ID NO: 355) | QMQLVQSGTEVKKPGESLKISCKGSGYGFITYWIGWVRQMPGKGLEWMG IIYPGDSETRYSPSFQGQVTISADKSINTAYLQWSSLKASDTAIYYCAG GSGISTPMDVWGQGTTVTV ASTKGPSVFPLAPSSKSTSGGTAALGCLVK DYFPEPVTVSWNSGALTSGVHTFPAVLQSSGLYSLSSVVTVPSSSLGTQ TYICNVNHKPSNTKVDKKVEPKSCDKTHTCPPCPAPELLGGPSVFLFPP KPKDTLMISRTPEVTCVWDVSHEDPEVKFNWYVDGVEVHNAKTKPREE QYNSTYRVVSVLTVLHQDWLNGKEYKCKVSNKALPAPIEKTISKAKGQP REPQVYTLPPSRDELTKNQVSLTCLVKGFYPSDIAVEWESNGQPENNYK |
| | TTPPVLDSDGSFFLYSKLTVDKSRWQQGNVFSCSVMHEALHNHYTQKSL SLSPGKKKKPLDGEYFTLQIRGRERFEMFRELNEALELKDAQAGKEPG |
| CR3022 scFv (SEQ ID NO: 356) | QMQLVQSGTEVKKPGESLKISCKGSGYGFITYWIGWVRQMPGKGLEWMG IIYPGDSETRYSPSFQGQVTISADKSINTAYLQWSSLKASDTAIYYCAG GSGISTPMDVWGQGTTVTVGGGGSGGGGSGGGGSDIQLTQSPDSLAVSL GERATINCKSSQSVLYSSINKNYLAWYQQKPGQPPKLLIYWASTRESGV PDRFSGSGSGTDFTLTISSLQAEDVAVYYCQQYSTPYTFGQGTKVEIK |
| CR3022 scFv-TD (SEQ ID NO: 357) | QMQLVQSGTEVKKPGESLKISCKGSGYGFITYWIGWVRQMPGKGLEWMG IIYPGDSETRYSPSFQGQVTISADKSINTAYLQWSSLKASDTAIYYCAG GSGISTPMDVWGQGTTVTVGGGGSGGGGSGGGGSDIQLTQSPDSLAVSL GERATINCKSSQSVLYSSINKNYLAWYQQKPGQPPKLLIYWASTRESGV PDRFSGSGSGTDFTLTISSLQAEDVAVYYCQQYYSTPYTFGQGTKVEIK KKKPLDGEYFTLQIRGRERFEMFRELNEALELKDAQAGKEPG |
| CR3022 scFv monomeric Ig-TD (SEQ ID NO: 358) | QMQLVQSGTEVKKPGESLKISCKGSGYGFITYWIGWVRQMPGKGLEWMG IIYPGDSETRYSPSFQGQVTISADKSINTAYLQWSSLKASDTAIYYCAG GSGISTPMDVWGQGTTVTVGGGGSGGGGSGGGGSDIQLTQSPDSLAVSL GERATINCKSSQSVLYSSINKNYLAWYQQKPGQPPKLLIYWASTRESGV PDRFSGSGSGTDFTLTISSLQAEDVAVYYCQQYSTPYTFGQGTKVEIK E PKSCDKTHTAPELLGGPSVFLFPPKPKDTLMISRTPEVTCVVVDVSHED PEVKFNWYVDGVEVHNAKTKPREEQYNSTYRWSVLTVLHQDWLNGKEY KCKVSNKALPAPIEKTISKAKGQPREPQVYTLPPSRDELTKNQVSLTCL VKGFYPSDIAVEWESNGQPENNYKTTPPVLDSDGSFFLYSKLTVDKSRW QQGNVFSCSVMHEALHNHYTQKSLSLSPGKKKKPLDGEYFTLQIRGRER FEMFRELNEALELKDAQAGKEPG |
| QB-DD (SEQ ID NO: 359) | QVQLQESGGGLVQTGGSLRLSCAASGSDFSSYAMAWFRQAPG |
| | KEREFVASISRRSTNTYYRNSVKGRFTISRDNAKNTAWLQMN |
| | SLKPEDTAVYYCAADRARYGSSWYESLAYLEVWGQGTQVTVSS |
| QB-GB (SEQ ID NO: 307) | QVQLQESGGGLVQAGGSLRLSCAASGRTFSEYAMGWFRQAPG |
| | KEREFVATISWSGGSTYYTDSVKGRFTISRDNAKNTVYLQMN |
| | SLKPDDTAVYYCAAAGLGTVVSEWDYDYDYWGQGTQVTVSS |
| EK1C4 (Peptide) | SLDQINVTFLDLEYEMKKLEEAIKKLEESYIDLKEL |
| (SEQ ID NO: 360) | |

TABLE 23 Continued

Amino acid sequence of Quad polypeptide monomers in different formats, all containing VHH QB-GB (QB-GB is the sequence that is not in bold in Q177 to 186)

| | |
|---|---|
| Name | Sequence |
| Q177 (SEQ ID NO: 361) | QVQLQESGGGLVQAGGSLRLSCAASGRTFSEYAMGWFRQAPGKEREFVATI SWSGGSTYYTDSVKGRFTISRDNAKNTVYLQMNSLKPDDTAVYYCAAAGLG TVVSEWDYDYDYWGQGTQVTVSS GGGGSGGGGSKKKPLDGEYFTLQIRGRE RFEMFRELNEALELKDAQAGKEPG |
| Q178 (SEQ ID NO: 362) | QVQLQESGGGLVQAGGSLRLSCAASGRTFSEYAMGWFRQAPGKEREFVATI SWSGGSTYYTDSVKGRFTISRDNAKNTVYLQMNSLKPDDTAVYYCAAAGLG TVVSEWDYDYDYWGQGTQVTVSSGGGGSGGGGSEPKSCDKTHTCPPCPAPE LLGGPSVFLFPPKPKDTLMISRTPEVTCVWDVSHEDPEVKFNWYVDGVEV HNAKTKPREEQYNSTYRVVSVLTVLHQDWLNGKEYKCKVSNKALPAPIEKT ISKAKGQPREPQVYTLPPSRDELTKNQVSLTCLVKGFYPSDIAVEWESNGQ PENNYKTTPPVLDSDGSFFLYSKLTVDKSRWQQGNVFSCSVMHEALHNHYT QKSLSLSPGK |
| Q179 (SEQ ID NO: 363) | QVQLQESGGGLVQAGGSLRLSCAASGRTFSEYAMGWFRQAPGKEREFVATI SWSGGSTYYTDSVKGRFTISRDNAKNTVYLQMNSLKPDDTAVYYCAAAGLG TVVSEWDYDYDYWGQGTQVTVSSGGGGSGGGGSEPKSCDKTHTCPPCPAPE LLGGPSVFLFPPKPKDTLMISRTPEVTCVWDVSHEDPEVKFNWYVDGVEV HNAKTKPREEQYNSTYRVVSVLTVLHQDWLNGKEYKCKVSNKALPAPIEKT ISKAKGQPREPQVYTLPPSRDELTKNQVSLTCLVKGFYPSDIAVEWESNGQ PENNYKTTPPVLDSDGSFFLYSKLTVDKSRWQQGNVFSCSVMHEALHNHYT QKSLSLSPGKKKKPLDGEYFTLQIRGRERFEMFRELNEALELKDAQAGKEP G |
| Q180 (SEQ ID NO: 364) | QVQLQESGGGLVQAGGSLRLSCAASGRTFSEYAMGWFRQAPGKEREFVATI SWSGGSTYYTDSVKGRFTISRDNAKNTVYLQMNSLKPDDTAVYYCAAAGLG TVVSEWDYDYDYWGQGTQVTVSSGGGGSGGGGSASTKGPSVFPLAPSSKST SGGTAALGCLVKDYFPEPVTVSWNSGALTSGVHTFPAVLQSSGLYSLSSW TVPSSSLGTQTYICNVNHKPSNTKVDKKVEPKSCDKTHTCPPCPAPELLGG PSVFLFPPKPKDTLMISRTPEVTCVWDVSHEDPEVKFNWYVDGVEVHNAK TKPREEQYNSTYRVVSVLTVLHQDWLNGKEYKCKVSNKALPAPIEKTISKA KGQPREPQVYTLPPSRDELTKNQVSLTCLVKGFYPSDIAVEWESNGQPENN YKTTPPVLDSDGSFFLYSKLTVDKSRWQQGNVFSCSVMHEALHNHYTQKSL SLSPGK |
| Q181 (SEQ ID NO: | QVQLQESGGGLVQAGGSLRLSCAASGRTFSEYAMGWFRQAPGKEREFVATI SWSGGSTYYTDSVKGRFTISRDNAKNTVYLQMNSLKPDDTAVYYCAAAGLG TVVSEWDYDYDYWGQGTQVTVSSGGGGSGGGGSASTKGPSVFPLAPSSKST |
| 365) | SGGTAALGCLVKDYFPEPVTVSWNSGALTSGVHTFPAVLQSSGLYSLSSW TVPSSSLGTQTYICNVNHKPSNTKVDKKVEPKSCDKTHTCPPCPAPELLGG PSVFLFPPKPKDTLMISRTPEVTCVWDVSHEDPEVKFNWYVDGVEVHNAK TKPREEQYNSTYRVVSVLTVLHQDWLNGKEYKCKVSNKALPAPIEKTISKA KGQPREPQVYTLPPSRDELTKNQVSLTCLVKGFYPSDIAVEWESNGQPENN YKTTPPVLDSDGSFFLYSKLTVDKSRWQQGNVFSCSVMHEALHNHYTQKSL SLSPGKKKKPLDGEYFTLQIRGRERFEMFRELNEALELKDAQAGKEPG |
| Q182 (SEQ ID NO: 286) | QVQLQESGGGLVQAGGSLRLSCAASGRTFSEYAMGWFRQAPGKEREFVATI SWSGGSTYYTDSVKGRFTISRDNAKNTVYLQMNSLKPDDTAVYYCAAAGLG TVVSEWDYDYDYWGQGTQVTVSSGGGGSGGGGSKRTVAAPSVFIFPPSDEQ LKSGTASVVCLLNNFYPREAKVQWKVDNALQSGNSQESVTEQDSKDSTYSL SSTLTLSKADYEKHKVYACEVTHQGLSSPVTKSFNRGEC |
| Q183 (SEQ ID NO: 366) | QVQLQESGGGLVQAGGSLRLSCAASGRTFSEYAMGWFRQAPGKEREFVATI SWSGGSTYYTDSVKGRFTISRDNAKNTVYLQMNSLKPDDTAVYYCAAAGLG TVVSEWDYDYDYWGQGTQVTVSSGGGGSGGGGSASTKGPSVFPLAPSSKST SGGTAALGCLVKDYFPEPVTVSWNSGALTSGVHTFPAVLQSSGLYSLSSW TVPSSSLGTQTYICNVNHKPSNTKVDKKVEPKSCDKTHTKKKPLDGEYFTL QIRGRERFEMFRELNEALELKDAQAGKEPG |
| Q184 (SEQ ID NO: 367) | QVQLQESGGGLVQAGGSLRLSCAASGRTFSEYAMGWFRQAPGKEREFVATI SWSGGSTYYTDSVKGRFTISRDNAKNTVYLQMNSLKPDDTAVYYCAAAGLG TVVSEWDYDYDYWGQGTQVTVSSGGGGSGGGGSASTKGPSVFPLAPSSKST SGGTAALGCLVKDYFPEPVTVSWNSGALTSGVHTFPAVLQSSGLYSLSSW TVPSSSLGTQTYICNVNHKPSNTKVDKKVEPKSCDKTHTAPELLGGPSVFL FPPKPKDTLMISRTPEVTCVVVDVSHEDPEVKFNWYVDGVEVHNAKTKPRE EQYNSTYRVVSVLTVLHQDWLNGKEYKCKVSNKALPAPIEKTISKAKGQPR EPQVYTLPPSRDELTKNQVSLTCLVKGFYPSDIAVEWESNGQPENNYKTTP PVLDSDGSFFLYSKLTVDKSRWQQGNVFSCSVMHEALHNHYTQKSLSLSPG KKKKPWGEYFTLQIRGRERFEMFRELNEALELKDAQAGKEPG |
| Q185 (SEQ ID NO: 368) | QVQLQESGGGLVQAGGSLRLSCAASGRTFSEYAMGWFRQAPGKEREFVATI SWSGGSTYYTDSVKGRFTISRDNAKNTVYLQMNSLKPDDTAVYYCAAAGLG TVVSEWDYDYDYWGQGTQVTVSSGGGGSGGGGSEPKSCDKTHTCPPCPAPE LLGGKKKPLDGEYFTLQIRGRERFEMFRELNEALELKDAQAGKEPG |
| Q186 (SEQ ID NO: 369) | QVQLQESGGGLVQAGGSLRLSCAASGRTFSEYAMGWFRQAPGKEREFVATI SWSGGSTYYTDSVKGRFTISRDNAKNTVYLQMNSLKPDDTAVYYCAAAGLG TVVSEWDYDYDYWGQGTQVTVSSGGGGSGGGGSASTKGPSVFPLAPSSKST SGGTAALGCLVKDYFPEPVTVSWNSGALTSGVHTFPAVLQSSGLYSLSSW TVPSSSLGTQTYICNVNHKPSNTKVDKKVEPKSCDKTHTCPPCPAPELLGG KKKPLDGEYFTLQIRGRERFEMFRELNEALELKDAQAGKEPG |

TABLE 23 Continued

Amino acid sequence of single variable domain binding sites QB-1 to 71, FE & BG; and Quad polypeptide monimers in different formats, all containing single variable domain binding sites (QB-3, 10, FE or BG)

| | |
|---|---|
| QB-1 (SEQ ID NO: 370) | QVQLVESGGGLVQAGGSLRLSCAASGFPVRKANMHWYRQAPGKEREW VAAIMSKGEQTVYADSVEGRFTISRDNAKNTVYLQMNSLKPEDTAVY YCRVFVGWHYFGQGTQVTVS |
| QB-2 (SEQ ID NO: 371) | QVQLVESGGGLVQAGGSLRLSCATSGFPVYQANMHWYRQAPGKEREW VAAIQSYGDGTHYADSVKGRFTISRDNAKNTVYLQMNSLKPEDTAVY YCRAVYVGMHYFGQGTQVTVS |
| QB-0C (SEQ ID NO: 372) | QVQLVESGGGLVQAGGSLRLSCAASGFPVNYKTMWWYRQAPGKEREW VAAIWSYGHTTHYADSVKGRFTISRDNAKNTVYLQMNSLKPEDTAVY YCWWVGHNYEGQGTQVTVS |
| QB-4 (SEQ ID NO: 373) | QVQLVESGGGLVQAGGSLRLSCAASGFPVYAQNMHWYRQAPGKEREW VAAIYSHGYWTLYADSVKGRFTISRDNAKNTVYLQMNSLKPEDTAVY YCEVQVGAWYTGQGTQVTVS |
| QB-5 (SEQ ID NO: 374) | QVQLVESGGGLVQAGGSLRLSCAASGFPVFSGHMHWYRQAPGKEREW VAAILSNGDSTHYADSVKGRFTISRDNAKNTVYLQMNSLKPEDTAVY YCRVHVGAHYFGQGTQVTVS |
| QB-6 (SEQ ID NO: 375) | QVQLVESGGGLVQAGGSLRLSCAASGFPVEQGRMYWYRQAPGKEREW VAAIISHGTVTVYADSVKGRFTISRDNAKNTVYLQMNSLKPEDTAVY YCYVYVGAQYWGQGTQVTVS |
| QB-7 (SEQ ID NO: 376) | QVQLVESGGGLVQAGGSLRLSCAASGFPVLFTYMHWYRQAPGKEREW VAAIWSSGNSTWYADSVKGRFTISRDNAKNTVYLQMNSLKPEDTAVY YCFVKVGNWYAGQGTQVTVS |
| QB-8 (SEQ ID NO: 377) | QVQLVESGGGLVQAGGSLRLSCAASGFPVNAGNMHWYRQAPGKEREW VAAIQSYGRTTYYADSVKGRFTISRDNAKNTVYLQMNSLKPEDTAVY YCRVFVGMHYFGQGTQVTVS |
| QB-9 (SEQ ID NO: 378) | QVQLVESGGGLVQAGGSLRLSCAASGFPVSSSTMTWYRQAPGKEREW VAAINSYGWETHYADSVKGRFTISRDNAKNTVYLQMNSLKPEDTAVY YCYVYVGGSYIGQGTQVTVS |
| QB-A0 | QVQLVESGGGLVQAGGSLRLSCAASGFPVQSHYMRWYRQAPGKEREW VAAIESTGHHTAYADSVKGRFTISRDNAKNTVYLQMNSLKPEDTAVY |
| (SEQ ID NO: 379) | YCTVYVGYEYHGQGTQVTVS |
| QB-11 (SEQ ID NO: 380) | QVQLVESGGGLVQAGGSLRLSCAASGFPVETENMHWYRQAPGKEREW VAAIYSHGMWTAYADSVKGRFTISRDNTKNTVYLQMNSLKPEDTAVY YCEVEVGKWYFGQGTQVTVS |
| QB-12 (SEQ ID NO: 381) | QVQLVESGGGLVQAGGSLRLSCAASGFPVKASRMYWYRQAPGKEREW VAAIQSFGEVTWYADSVKGRFTISRDNAKNTVYLQMNSLKPEDTAVY YCYVWVGQEYWGQGTQVTVS |
| QB-13 (SEQ ID NO: 382) | QVQLVESGGGLVQAGGSLRLSCAASGFPVYASNMHWYRQAPGKEREW VAAIESQGYMTAYADSVKGRFTISRDNAKNTVYLQMNSLKPEDTAVY YCWVIVGEYYVGQGTQVTVS |
| QB-14 (SEQ ID NO: 383) | QVQLVESGGGLVQAGGSLRLSCAASGFPVQAREMEWYRQAPGKEREW VAAIKSTGTYTAYAYSVKGRFTISRDNAKNTVYLQMNSLKPEDTAVY YCYVYVGSSYIGQGTQVTVS |
| QB-15 (SEQ ID NO: 384) | QVQLVESGGGLVQAGGSLRLSCAASGFPVKNFEMEWYRKAPGKEREW VAAIQSGGVETYYADSVKGRFTISRDNAKNTVYLQMNSLKPEDTAVY YCFVYVGRSYIGQGTQVTVS |
| QB-16 (SEQ ID NO: 385) | QVQLVESGGGLVQAGGSLRLSCAASGFPVAYKTMWWYRQAPGKEREW VAAIESYGIKWTRYADSVKGRFTISRDNAKNTVYLQMNSLKPEDTAV YYCIVWVGAQYHGQGTQVTVS |
| QB-17 (SEQ ID NO: 386) | QVQLVESGGGLVQAGGSLRLSCAASGFPVAGRNMWWYRQAPGKEREW VAAIYSSGTYTEYADSVKGRFTISRDNAKNTVYLQMNSLKPEDTAVY YCHVWVGSLYKGQGTQVTVS |
| QB-18 (SEQ ID NO: 387) | QVQLVESGGGLVQAGGSLRLSCAASGFPVKHARMWWYRQAPGKEREW VAAIDSHGDTTWYADSVKGRFTISRDNAKNTVYLQMNSLKPEDTAVY YCYVYVGASYWGQGTQVTVS |
| QB-19 (SEQ ID NO: 388) | QVQLVESGGGLVQAGGSLRLSCAASGFPVNSHEMTWYRQAPGKEREW VAAIQSTGTVTEYADSVKGRFTISRDNAKNTVYLQMNSLKPEDTAVY YCYVYVGSSYLGQGTQVTVS |
| QB-20 (SEQ ID | QVQLVESGGGLVQAGGSLRLSCAASGFPVEQREMEWYRQAPGKEREW VAAIDSNGNYTFYADSVKGRFTISRDNAKNTVYLQMNSLKPEDTAVY |
| NO: 389) | YCYVYVGKSYIGQGTQVTVS |
| QB-21 (SEQ ID NO: 390) | QVQLVESGGGLVQAGGSLRLSCAASGFPVKHHWMFWYRQAPGKEREW VAAIKSYGYGTEYADSVKGRFTISRDNAKNTVYLQMNSLKPEDTAVY YCFVGVGTHYAGQGTQVTVS |
| QB-23 (SEQ ID NO: 391) | QVQLVESGGGLVQAGGSLRLSCAASGFPVYAAEMEWYRQAPGKEREW VAAISSQGTITYYADSVKGRFTISRDNAKNTVYLQMNSLKPEDTAVY YCFVYVGKSYIGQGTQVSVS |
| QB-25 (SEQ ID NO: 392) | QVQLVESGGGLVQAGGSLRLSCAASGFPVHAWEMAWYRQAPGKEREW VAAIRSFGSSTHYADSVKGRFTISRDNAKNTVYLQMNSLKPEDTAVY YCNVKDFGTHHYAYDYWGQGTQVTVS |
| QB-26 (SEQ ID NO: 393) | QVQLVESGGGLVQAGGSLRLSCAASGFPVNTWWMHWYRQAPGKEREW VAAITSWGFRTYYADSVKGRFTISRDNAKNTVYLQMNSLKPEDTAVY YCNVKDKGMAVQWYDYWGQGTQVTVS |
| QB-28 (SEQ ID NO: 394) | QVQLVESGGGLVQAGGSLRLSCAASGFPVYHSTMFWYRQAPGKEREW VAAIYSSGQHTYYADSVKGRFTISRDNAKNTVYLQMNSLKPEDTAVY YCNVKDSGQWRQEYDYWGQGTQVTVS |
| QB-29 (SEQ ID NO: 395) | QVQLVESGGGLVQAGGSLRLSCAASGFPVEHEMAWYRQAPGKEREWV AAIRSMGRKTIYADSVKGRFTISRDNAKNTVYIQMNSIKPEDTAVYY CNVKDFGYTWHEYDYWGQGTQVTVS |
| QB-30 (SEQ ID NO: 396) | QVQLVESGGGLVQAGGSLRLSCAASGFPVTMAWMWWYRQAPGKEREW VAAIRSEGVRTYYADSVKGRFTISRDNAKNTVYLQMNSLKPEDTAVY YCNVKDYGQAHAYYDYWGQGTQVTVS |
| QB-31 (SEQ ID NO: 397) | QVQLVESGGGLVQAGGSLRLSCAASGFPVNSHFMEWYRQAPGKEREW VAAIQHSSGFHTYYADSVKGRFTISRDNAKNTVYLQMNSLKPEDTAV YYCNVKDTGTTEDYDYWGQGTQVTVS |
| QB-32 (SEQ ID NO: 398) | QVQLDESGGGLVQAGGSLRLSCAASGFPVYHAWMEWYRQAPGKEREW VAAITSSGRHTYYADSVKGRFTISRDNAKNTVYLQMNSLKPEDTAVY YCNVKDAGRVYNSYDYWGQGTQVTVS |
| QB-33 (SEQ ID NO: 399) | QVQLVESGGGLVQAGGSLRLSCAASGFPVAHAWMEWYRQAPGKEREW VAAITSYGYKTYYADSVKGRFTISRDNAKNTVYLQMNSLKPEDTAVY YCNVKDTGTYRFYYDYWGQGTQVTVS |
| QB-34 (SEQ ID NO: 400) | QVQLVESGGGLVQAGGSLRLSCAASGFPVWNQTMVWYRQAPGKEREW VAAIWSMGHTYYADSVKGRFTISRDNAKNTVYLQMNSLKPEDTAVYY CNVKDAGVYNRYYDYWGQGTQVTVS |
| QB-35 (SEQ ID NO: 401) | QVQLVESGGGLVQAGGSLRLSCAASGFPVEHYWMEWYRQAPGKEREW VAAITSFGYRTYYADSVKGRFTISRDNAKNTVYLQMNSLKPEDTAVY YCNVKDWGFASHAYDYWGQGIQVTVS |
| QB-36 (SEQ ID NO: 402) | QVQLVESGGGLVQAGGSLRLSCAASGFPEIAWEMAWYRQAPGKEREW VAAIRSFGERTLYADSVKGRFTISRDNAKNTVYLQMNSLKPEDTAVY YCNVKDFGWQHQEYDYWGQGTQVTVS |
| QB-37 (SEQ ID NO: 403) | QVQLVESGGGLVQAGGSLRLSCAASGFPVYHAYMEWYRQAPGKEREW VAAIYSNGEHTYYADSVKGRFTISRDNAKNTVYLQMNSLKPEDTAVY YCNVKDSGSFNQAYDYWGQGTQVTVS |
| QB-38 (SEQ ID NO: 404) | QVQLVESGGGLVQAGGSLRLSCAASGFPVEWSHMHWYRQAPGKEREW VAAIVSKGGYTLYADSVKGRFTISRDNAKNTVYLQMNSLKPEDTAVY YCNVKDYGVHFKRYDYWGQGTQVTVI |
| QB-39 (SEQ ID NO: 405) | QVQLVESGGGLVQAGGSLRLSCAASGFPVFHVWMEWYRQAPGKEREW VAAIDSAGWHTYYADSVKGRFTISRDNAKNTVYLQMNSLKPEDTAVY YCNVKDAGNTTSAYDYWGQGTQVTVS |
| QB-40 (SEQ ID NO: 406) | QVQLVESGGGLVQAGGSLRLSCAASGFPVYYNWMEWYRQAPGKEREW VAAIHSNGDETFYADSVKGRFTISRDNAKNTVYLQMNSLKPEDTAVY YCNVKDIDAEAYAYDYWGQGTQVTVS |
| QB-41 (SEQ ID NO: 407) | QVQLVESGGGLVQAGGSLRLSCAASGFPVYHVWMEWYRQAPGKEREW VAAITSSGSHTYYADSVKGRFTISRDNAKNTVYLQMNSLKPEDTAVY YCNVKDSGQWRVQYDYWGQGTQVTVS |
| QB-42 (SEQ ID NO: 408) | QVQLVESGGGLVQAGGSLRLSCAASGFPVYWHHMHWYRQAPGKEREW VAAIISWGWYTTYADSVKGRFTISRDNAKNTVYLQMNSLKPEDTAVY YCNVKDHGAQNQMYDYWGQGTQVTVS |
| QB-45 (SEQ ID NO: 409) | QVQLVESGGGLVQAGGSLRLSCAASGFPVYRDRMAWYRQAPGKEREW VAAIYSAGQQTRYADSVKGRFTISRDNAKNTVYLQMNSLKPEDTAVY YCNVKDVGHHYEYYDYWGQGTQVTVS |
| QB-46 | QVQLVESGGGLVQAGGSLRLSCAASGFPVDNGYMHWYRQAPGKEREW |
| (SEQ ID NO: 410) | VAAIDSYGWHTIYADSVKGRFTISRDNAKNTVYLQMNSLKPEDTAVY YCNVKDKGQMRAAYDYWGQGTQVTVS |
| QB-47 (SEQ ID NO: 411) | QVQLVESGGGLVQAGGSLRLSCAASGFPVSWHSMYWYRQAPGKEREW VAAIFSEGDWTYYADSVKGRFTISRDNAKNTVYLQMNSLKPEDTAVY YCNVKDYGSSYYKYDYWGQGTQVTVS |
| QB-48 (SEQ ID NO: 412) | QVQLVESGGGLVQAGGSLRLSCAASGFPVSQSVMAWYRQAPGKEREW VAAIYSKGQYTHYADSVKGRFTISRDNAKNTVYLQMNSLKPEDTAVY YCNVKDAGSSYWDYDYWGQGTQVTVS |
| QB-49 (SEQ ID NO: 413) | QVQLVESGGGSVQAGGSLRLSCAASGSIGQIEYLGWFRQAPGKEREG VAALNTWTGRTYYADSVKGRFTVSLDNAKNTVYLQMNSLKPEDTALY YCAAARWGRTKPLNTYYYSYWGQGTPVTVS |
| QB-50 (SEQ ID NO: 414) | QVQLVESGGGSVQAGGSLRLSCAASGYIDKIVYLGWFRQAPGKEREG VAALYTLSGHTYYADSVKGRFTVSLDNAKNTVYLQMNSLKPEDTALY YCAAATEGHAHALYRLHYYWGQGTQVTVS |
| QB-51 (SEQ ID NO: 415) | QVQLVESGGGLVQAGGSLRLSCAASGFPVYQGEMHWYRQAPGKEREW VAAIRSTGVQTWYADSVKGRFTISRDNAKNTVYLQMNSLKPEDTAVY YCRVWVGTHYFGQGTQVTVS |
| QB-52 (SEQ ID NO: 416) | QVQLVESGGGSVQAGGSLRLSCAASGNIQRIYYLGWFRQAPGKEREG VAALMTYTGHTYYADSVKGRFTVSLDNAKNTVYLQMNSLKPEDTALY YCAAAYVGAENPLPYSMYGYWGQGTQVTVS |
| QB-53 (SEQ ID NO: 417) | QVQLVESGGGSVQAGGSLRLSCAASGQISHIKYLGWFRQAPGKEREG VAALITRWGQTYYADSVKGRFTVSLDNAKNTVYLQMNSLKPEDTALY YCAAADYGASDPLWFIHYLYWGQGTQVTVS |
| QB-55 (SEQ ID NO: 418) | QVQLVESGGGSVQAGGSLRLSCAASGKIWTIKYLGWFRQAPGKEREG VAALMTRWGYTYYADSVKGRFTVSLDNAKNTVYLQMNSLKPEDTALY YCAAANYGSNFPLAEEDYWYWGQGTQVTVS |
| QB-56 (SEQ ID NO: 419) | QVQLVESGGGSVQAGGSLRLSCAASGNISQIHYLGWFRQAPGKEREG VAALNTDYGYTYYADSVKGRFTVSLDNAKNTVYLQMNSLKPEDTALY YCAAAYYFGDDIPLWWEAYSYWGQGTQVTVS |
| QB-58 (SEQ ID | QVQLVESGGGSVQAGGSLRLSCAASGNISTIEYLGWFRQAPGKEREG VAALYTWHGQTYYADSVKGRFTVSLDNAKNTVYLQMNSLKPEDTALY |
| NO: 420) | YCAAARWGRHMPLSATEYSYWGQGTQVTVS |
| QB-59 (SEQ ID NO: 421) | QVQLVESGGGSVQAGGSLRLSCAASGNIESIYYLGWFRQAPGKEREG VAALWTGDGETYYADSVKGRFTVSLDNAKNTVYLQMNSLKPEDTALY YCAAAAWGNSAPLTTYRYYYWGQGTQVTVS |
| QB-61 (SEQ ID NO: 422) | QVQLVESGGGSVQAGGSLRLSCAASGFIYGITYLGWFRQAPGKEREG VAALVTWNGQTYYADSVKGRFTVSLDNAKNTVYLQMNSLKPEDTALY YCAAADWGYDWPLWDEWYWYWGQGTQVTVS |
| QB-62 (SEQ ID NO: 423) | QVQLVESGGGSVQAGGSLRLSCAASGTIADIKYLGWFRQAPGKEREG VAALMTRWGSTYYADSVKGRFTVSLDNAKNTVYLQMNSLKPEDTALY YCAAANYGANYPLYSQQYSYWGQGTQVTVS |
| QB-63 (SEQ ID NO: 424) | QVQLVESGGGSVQAGGSLRLSCAASGSISSIKYLGWFRQAPGKEREG VAALMTRWGMTYYADSVKGRFTVSLDNAKNTVYLQMNSLKPEDTALY YCAAANYGANEPLQYTHYNYWGQGTQVTVS |
| QB-64 (SEQ ID NO: 425) | QVQLVESGGGSVQAGGSLRLSCAASGEIESIFYLGWFRQAPGKEREG VAALYTYVGQTYYADSVKGRFTVSLDNAKNTVYLQMNSLKPEDTALY YCAAASYGAAHPLSIMRYYYWGQGTQVTVS |
| QB-66 (SEQ ID NO: 426) | QVQLVESGGGSVQAGGSLRLSCAASGSIQAITYLGWFRQAPGKEREG VAALVTWNGQTYYADSVKGRFTVSLDNAKNTVYLQMNSLKPEDTALY YCAAADWGYDWPLWDEWYWYWGQGTQVTVS |
| QB-67 (SEQ ID NO: 427) | QVQLVESGGGSVQAGGSLRLSCAASGSISSITYLGWFRQAPGKEREG VAALVTYSGNTYYADSVKGRFTVSLDNAKNTVYLQMNSLKPEDTALY YCAAATWGHSWPLYNDEYWYWGQGSQVTVS |
| QB-68 (SEQ ID NO: 428) | QVQLVESGGGSVQAGGSLRLSCAASGSISSITYLGWFRQAPGKEREG VAALITVNGHTYYADSVKGRFTVSLDNAKNTVYLQMNSLKPEDTALY YCAAAAWGYAWPLHQDDYWYWGQGTQVTVS |
| QB-69 (SEQ ID NO: 429) | QVQLVESGGGSVQAGGSLRLSCAASGSISSITYLGWFRQAPGKEREG VAALNTFNGTTYYADSVKGRFTVSLDNAKNTVYLQMNSLKPEDTALY YCAAATWGYSWPLIAEYNWYWGQGTQVTVS |
| QB-71 (SEQ ID NO: 430) | QVQLVESGGGSVQAGGSLRLSCAASGSISSITYLGWFRQAPGKEREG VAALKTQAGFTYYADSVKGRFTVSLDNAKNTVYLQMNSLKPEDTALY YCAAANWGYSWPLYEADDWYWGQGTQVTVS |
| QB-BG (SEQ ID NO: 431) | QVQLVESGGGLVQAGGSLRLSCAASGFPVYNTWMEWYRQAPGKEREW VAAITSHGYKTYYADSVKGRFTISRDNAKNTVYLQMNSLKPEDTAVY YCNVKDEGDMFTAYDYWGQGTQVTVS |
| QB-FE (SEQ ID NO: 432) | QVQLVESGGGSVQAGGSLRLSCAASGTIAHIKYLGWFRQAPGKEREG VAALMTKWGQTYYADSVKGRFTVSLDNAKNTVYLQMNSLKPEDTALY YCAAASYGANFPLKASDYSYWGQGTQVTVS |
| QB-0C mIg-TD (SEQ ID NO: 433) (QB-3 is the sequence not in bold) | QVQLVESGGGLVQAGGSLRLSCAASGFPVNYKTMWWYRQAPGKEREW VAAIWSYGHTTHYADSVKGRFTISRDNAKNTVYLQMNSLKPEDTAVY YCWWVGHNYEGQGTQVTVSSGGGGSGGGGSEPKSCDKTHTCPPCPA PELLGGPSVFLFPPKPKDTLMISRTPEVTCVVVDVSHEDPEVKFNWY VDGVEVHNAKTKPREEQYNSTYRWSVLTVLHQDWLNGKEYKCKVSN KALPAPIEKTISKAKGQPREPQVYTLPPSRDELTKNQVSLTCLVKGF YPSDIAVEWESNGQPENNYKTTPPVLDSDGSFFLYSKLTVDKSRWQQ GNVFSCSVMHEALHNHYTQKSLSLSPGKKKKPLDGEYFTLQIRGRER FEMFRELNEALELKDAQAGKEPG |
| QB-A0 mIg-TD (SEQ ID NO: 434) (QB-10 is the sequence not in bold) | QVQLVESGGGLVQAGGSLRLSCAASGFPVQSHYMRWYRQAPGKEREW VAAIESTGHHTAYADSVKGRFTISRDNAKNTVYLQMNSLKPEDTAVY YCTVYVGYEYHGQGTQVTVSSGGGGSGGGGSEPKSCDKTHTCPPCPA PELLGGPSVFLFPPKPKDTLMISRTPEVTCVVVDVSHEDPEVKFNWY VDGVEVHNAKTKPREEQYNSTYRWSVLTVLHQDWLNGKEYKCKVSN KALPAPIEKTISKAKGQPREPQVYTLPPSRDELTKNQVSLTCLVKGF YPSDIAVEWESNGQPENNYKTTPPVLDSDGSFFLYSKLTVDKSRWQQ GNVFSCSVMHEALHNHYTQKSLSLSPGKKKKPLDGEYFTLQIRGRER FEMFRELNEALELKDAQAGKEPG |
| QB-BG mIg-TD (SEQ ID NO: 435) QB-G B is the sequ- | QVQLVESGGGLVQAGGSLRLSCAASGFPVYNTWMEWYRQAPGKEREW VAAITSHGYKTYYADSVKGRFTISRDNAKNTVYLQMNSLKPEDTAVY YCNVKDEGDMFTAYDYWGQGTQVTVSSGGGGSGGGGSEPKSCDKTHT CPPCPAPELLGGPSVFLFPPKPKDTLMISRTPEVTCVVVDVSHEDPE VKFNWYVDGVEVHNAKTKPREEQYNSTYRVVSVLTVLHQDWLNGKEY KCKVSNKALPAPIEKTISKAKGQPREPQVYTLPPSRDELTKNQVSLT CLVKGFYPSDIAVEWESNGQPENNYKTTPPVLDSDGSFFLYSKLTVD KSRWQQGNVFSCSVMHEALHNHYTQKSLSLSPGKKKKPLDGEYFTLQ |
| ence not in bold) | IRGRERFEMFRELNEALELKDAQAGKEPG |
| QB-FE mIg-TD (SEQ ID NO: 436) (QB-FE is the sequenc e not in bold) | QVQLVESGGGSVQAGGSLRLSCAASGTIAHIKYLGWFRQAPGKEREG VAALMTKWGQTYYADSVKGRFTVSLDNAKNTVYLQMNSLKPEDTALY YCAAASYGANFPLKASDYSYWGQGTQVTVSSGGGGSGGGGSEPKSCD KTHTCPPCPAPELLGGPSVFLFPPKPKDTLMISRTPEVTCVVVDVSH EDPEVKFNWYVDGVEVHNAKTKPREEQYNSTYRVVSVLTVLHQDWLN GKEYKCKVSNKALPAPIEKTISKAKGQPREPQVYTLPPSRDELTKNQ VSLTCLVKGFYPSDIAVEWESNGQPENNYKTTPPVLDSDGSFFLYSK LTVDKSRWQQGNVFSCSVMHEALHNHYTQKSLSLSPGKKKKPLDGEY FTLQIRGRERFEMFRELNEALELKDAQAGKEPG |

[2553] Table 24. Amino acid sequences of ACE2 in different formats for capturing or neutralizing SARS-CoV or SARS-CoV-2 or other related coronavirus strains. Each of the sequences outlined in this table can be further generated with or without a N- or C-terminus affinity tag as outlined in Table 22 and shown schematically in FIGS. 5A-C. ACE2 extracellular domain can be composed of either amino acids 18-615 or amino acids 18-740. The tetramerization domain (TD) is preferably TD from p53 but not limited by it.

[2554] The ACE2 sequences for use in the present invention are underlined and are intended to be read as written (ie, as part of the full sequence including non-underlined part) or alternatively without the futher underlined sequence.

[2555] In an embodiment, the polypeptide of the invention comprises a sequence that is shown in bold in this Table 24. In an embodiment, the polypeptide of the invention comprises, in N- to C-terminal direction, a binding domain or peptide; and a sequence that is shown in bold in this Table 24. The binding domain may be any binding domain disclosed herein, eg, a VH, VL, VHH, dAb or scFv.

[2556] The present disclosure further comprises each underlined sequence without the following bold sequence, eg, to provide a binding site or domain for use in any polypeptide or mutimer of the invention herein. The present disclosure further comprises each bold sequence without the immediately preceding underlined sequence, eg, to for use in any polypeptide or mutimer of the invention herein (such as as part of a polypeptide comprising a binding domain or peptide immediately preceding the bold sequence).

| Name | Sequence |
|---|---|
| ACE2(18-615) (SEQ ID NO: 437) | QSTIEEQAKTFLDKFNHEAEDLFYQSSLASWNYNTNITEENVQNMNNAG DKWSAFLKEQSTLAQMYPLQEIQNLTVKLQLQALQQNGSSVLSEDKSKR LNTILNTMSTIYSTGKVCNPDNPQECLLLEPGLNEIMANSLDYNERLWA WESWRSEVGKQLRPLYEEYVVLKNEMARANHYEDYGDYWRGDYEVNGVD GYDYSRGQLIEDVEHTFEEIKPLYEHLHAYVRAKLMNAYPSYISPIGCL PAHLLGDMWGRFWTNLYSLTVPFGQKPNIDVTDAMVDQAWDAQRIFKEA EKFFVSVGLPNMTQGFWENSMLTDPGNVQKAVCHPTAWDLGKGDFRILM CTKVTMDDFLTAHHEMGHIQYDMAYAAQPFLLRNGANEGFHEAVGEIMS LSAATPKHLKSIGLLSPDFQEDNETEINFLLKQALTIVGTLPFTYMLEK WRWMVFKGEIPKDQWMKKWWEMKREIVGVVEPVPHDETYCDPASLFHVS NDYSFIRYYTRTLYQFQFQEALCQAAKHEGPLHKCDISNSTEAGQKLFN MLRLGKSEPWTLALENVVGAKNMNVRPLLNYFEPLFTWLKDQNKNSFVG WSTDWSPYAD |
| ACE2(18-615)-TD (SEQ ID NO: 438) | QSTIEEQAKTFLDKFNHEAEDLFYQSSLASWNYNTNITEENVQNMNNAG DKWSAFLKEQSTLAQMYPLQEIQNLTVKLQLQALQQNGSSVLSEDKSKR LNTILNTMSTIYSTGKVCNPDNPQECLLLEPGLNEIMANSLDYNERLWA WESWRSEVGKQLRPLYEEYVVLKNEMARANHYEDYGDYWRGDYEVNGVD GYDYSRGQLIEDVEHTFEEIKPLYEHLHAYVRAKLMNAYPSYISPIGCL PAHLLGDMWGRFWTNLYSLTVPFGQKPNIDVTDAMVDQAWDAQRIFKEA EKFFVSVGLPNMTQGFWENSMLTDPGNVQKAVCHPTAWDLGKGDFRILM CTKVTMDDFLTAHHEMGHIQYDMAYAAQPFLLRNGANEGFHEAVGEIMS LSAATPKHLKSIGLLSPDFQEDNETEINFLLKQALTIVGTLPFTYMLEK WRWMVFKGEIPKDQWMKKWWEMKREIVGVVEPVPHDETYCDPASLFHVS NDYSFIRYYTRTLYQFQFQEALCQAAKHEGPLHKCDISNSTEAGQKLFN MLRLGKSEPWTLALENVVGAKNMNVRPLLNYFEPLFTWLKDQNKNSFVG WSTDWSPYADKKKPLDGEYFTLQIRGRERFEMFRELNEALELKDAQAGK EPG |
| ACE2(18-615) monomeric Ig-TD (SEQ ID NO: 439) | QSTIEEQAKTFLDKFNHEAEDLFYQSSLASWNYNTNITEENVQNMNNAG DKWSAFLKEQSTLAQMYPLQEIQNLTVKLQLQALQQNGSSVLSEDKSKR LNTILNTMSTIYSTGKVCNPDNPQECLLLEPGLNEIMANSLDYNERLWA WESWRSEVGKQLRPLYEEYVVLKNEMARANHYEDYGDYWRGDYEVNGVD GYDYSRGQLIEDVEHTFEEIKPLYEHLHAYVRAKLMNAYPSYISPIGCL PAHLLGDMWGRFWTNLYSLTVPFGQKPNIDVTDAMVDQAWDAQRIFKEA EKFFVSVGLPNMTQGFWENSMLTDPGNVQKAVCHPTAWDLGKGDFRILM CTKVTMDDFLTAHHEMGHIQYDMAYAAQPFLLRNGANEGFHEAVGEIMS LSAATPKHLKSIGLLSPDFQEDNETEINFLLKQALTIVGTLPFTYMLEK WRWMVFKGEIPKDQWMKKWWEMKREIVGVVEPVPHDETYCDPASLFHVS |
| | NDYSFIRYYTRTLYQFQFQEALCQAAKHEGPLHKCDISNSTEAGQKLFN MLRLGKSEPWTLALENVVGAKNMNVRPLLNYFEPLFTWLKDQNKNSFVG WSTDWSPYAD EPKSCDKTHTAPELLGGPSVFLFPPKPKDTLMISRTPEV TCVWDVSHEDPEVKFNWYVDGVEVHNAKTKPREEQYNSTYRWSVLTV LHQDWLNGKEYKCKVSNKALPAPIEKTISKAKGQPREPQVYTLPPSRDE LTKNQVSLTCLVKGFYPSDIAVEWESNGQPENNYKTTPPVLDSDGSFFL YSKLTVDKSRWQQGNVFSCSVMHEALHNHYTQKSLSLSPGKKKKPWGE YFTLQIRGRERFEMFRELNEALELKDAQAGKEPG |
| ACE2(18-615) Ig-TD (SEQ ID NO: 440) | QSTIEEQAKTFLDKFNHEAEDLFYQSSLASWNYNTNITEENVQNMNNAG DKWSAFLKEQSTLAQMYPLQEIQNLTVKLQLQALQQNGSSVLSEDKSKR LNTILNTMSTIYSTGKVCNPDNPQECLLLEPGLNEIMANSLDYNERLWA WESWRSEVGKQLRPLYEEYVVLKNEMARANHYEDYGDYWRGDYEVNGVD GYDYSRGQLIEDVEHTFEEIKPLYEHLHAYVRAKLMNAYPSYISPIGCL PAHLLGDMWGRFWTNLYSLTVPFGQKPNIDVTDAMVDQAWDAQRIFKEA EKFFVSVGLPNMTQGFWENSMLTDPGNVQKAVCHPTAWDLGKGDFRILM CTKVTMDDFLTAHHEMGHIQYDMAYAAQPFLLRNGANEGFHEAVGEIMS LSAATPKHLKSIGLLSPDFQEDNETEINFLLKQALTIVGTLPFTYMLEK WRWMVFKGEIPKDQWMKKWWEMKREIVGVVEPVPHDETYCDPASLFHVS NDYSFIRYYTRTLYQFQFQEALCQAAKHEGPLHKCDISNSTEAGQKLFN MLRLGKSEPWTLALENVVGAKNMNVRPLLNYFEPLFTWLKDQNKNSFVG WSTDWSPYAD EPKSCDKTHTAPELLGGPSVFLFPPKPKDTLMISRTPEV TCVWDVSHEDPEVKFNWYVDGVEVHNAKTKPREEQYNSTYRWSVLTV LHQDWLNGKEYKCKVSNKALPAPIEKTISKAKGQPREPQVYTLPPSRDE LTKNQVSLTCLVKGFYPSDIAVEWESNGQPENNYKTTPPVLDSDGSFFL YSKLTVDKSRWQQGNVFSCSVMHEALHNHYTQKSLSLSPGKASTKGPSV FPLAPSSKSTSGGTAALGCLVKDYFPEPVTVSWNSGALTSGVHTFPAVL QSSGLYSLSSVVTVPSSSLGTQTYICNVNHKPSNTKVDKKVEPKSCDKT HTCPPCPAPELLGGPSVFLFPPKPKDTLMISRTPEVTCVWDVSHEDPE VKFNWYVDGVEVHNAKTKPREEQYNSTYRWSVLTVLHQDWLNGKEYKC KVSNKALPAPIEKTISKAKGQPREPQVYTLPPSRDELTKNQVSLTCLVK GFYPSDIAVEWESNGQPENNYKTTPPVLDSDGSFFLYSKLTVDKSRWQQ GNVFSCSVMHEALHNHYTQKSLSLSPGKKKKPLDGEYFTLQIRGRERFE MFRELNEALELKDAQAGKEPG |
| ACE2(18-740) (SEQ ID NO: 441) | QSTIEEQAKTFLDKFNHEAEDLFYQSSLASWNYNTNITEENVQNMNNAG DKWSAFLKEQSTLAQMYPLQEIQNLTVKLQLQALQQNGSSVLSEDKSKR LNTILNTMSTIYSTGKVCNPDNPQECLLLEPGLNEIMANSLDYNERLWA WESWRSEVGKQLRPLYEEYVVLKNEMARANHYEDYGDYWRGDYEVNGVD GYDYSRGQLIEDVEHTFEEIKPLYEHLHAYVRAKLMNAYPSYISPIGCL PAHLLGDMWGRFWTNLYSLTVPFGQKPNIDVTDAMVDQAWDAQRIFKEA EKFFVSVGLPNMTQGFWENSMLTDPGNVQKAVCHPTAWDLGKGDFRILM CTKVTMDDFLTAHHEMGHIQYDMAYAAQPFLLRNGANEGFHEAVGEIMS LSAATPKHLKSIGLLSPDFQEDNETEINFLLKQALTIVGTLPFTYMLEK WRWMVFKGEIPKDQWMKKWWEMKREIVGVVEPVPHDETYCDPASLFHVS NDYSFIRYYTRTLYQFQFQEALCQAAKHEGPLHKCDISNSTEAGQKLFN |
| | MLRLGKSEPWTLALENVVGAKNMNVRPLLNYFEPLFTWLKDQNKNSFVG WSTDWSPYADQSIKVRISLKSALGDKAYEWNDNEMYLFRSSVAYAMRQY FLKVKNQMILFGEEDVRVANLKPRISFNFFVTAPKNVSDIIPRTEVEKA IRMSRSRINDAFRLNDNSLEFLGIQPTLGPPNQPPVS |
| ACE2(18-740)-TD (SEQ ID NO: 442) | QSTIEEQAKTFLDKFNHEAEDLFYQSSLASWNYNTNITEENVQNMNNAG DKWSAFLKEQSTLAQMYPLQEIQNLTVKLQLQALQQNGSSVLSEDKSKR LNTILNTMSTIYSTGKVCNPDNPQECLLLEPGLNEIMANSLDYNERLWA WESWRSEVGKQLRPLYEEYVVLKNEMARANHYEDYGDYWRGDYEVNGVD GYDYSRGQLIEDVEHTFEEIKPLYEHLHAYVRAKLMNAYPSYISPIGCL PAHLLGDMWGRFWTNLYSLTVPFGQKPNIDVTDAMVDQAWDAQRIFKEA EKFFVSVGLPNMTQGFWENSMLTDPGNVQKAVCHPTAWDLGKGDFRILM CTKVTMDDFLTAHHEMGHIQYDMAYAAQPFLLRNGANEGFHEAVGEIMS LSAATPKHLKSIGLLSPDFQEDNETEINFLLKQALTIVGTLPFTYMLEK WRWMVFKGEIPKDQWMKKWWEMKREIVGVVEPVPHDETYCDPASLFHVS NDYSFIRYYTRTLYQFQFQEALCQAAKHEGPLHKCDISNSTEAGQKLFN MLRLGKSEPWTLALENVVGAKNMNVRPLLNYFEPLFTWLKDQNKNSFVG WSTDWSPYADQSIKVRISLKSALGDKAYEWNDNEMYLFRSSVAYAMRQY FLKVKNQMILFGEEDVRVANLKPRISFNFFVTAPKNVSDIIPRTEVEKA IRMSRSRINDAFRLNDNSLEFLGIQPTLGPPNQPPVSKKKPLDGEYFTL QIRGRERFEMFRELNEALELKDAQAGKEPG |
| ACE2(18-740) monomeric Ig-TD (SEQ ID NO: 443) | QSTIEEQAKTFLDKFNHEAEDLFYQSSLASWNYNTNITEENVQNMNNAG DKWSAFLKEQSTLAQMYPLQEIQNLTVKLQLQALQQNGSSVLSEDKSKR LNTILNTMSTIYSTGKVCNPDNPQECLLLEPGLNEIMANSLDYNERLWA WESWRSEVGKQLRPLYEEYVVLKNEMARANHYEDYGDYWRGDYEVNGVD GYDYSRGQLIEDVEHTFEEIKPLYEHLHAYVRAKLMNAYPSYISPIGCL PAHLLGDMWGRFWTNLYSLTVPFGQKPNIDVTDAMVDQAWDAQRIFKEA EKFFVSVGLPNMTQGFWENSMLTDPGNVQKAVCHPTAWDLGKGDFRILM CTKVTMDDFLTAHHEMGHIQYDMAYAAQPFLLRNGANEGFHEAVGEIMS LSAATPKHLKSIGLLSPDFQEDNETEINFLLKQALTIVGTLPFTYMLEK WRWMVFKGEIPKDQWMKKWWEMKREIVGVVEPVPHDETYCDPASLFHVS NDYSFIRYYTRTLYQFQFQEALCQAAKHEGPLHKCDISNSTEAGQKLFN MLRLGKSEPWTLALENVVGAKNMNVRPLLNYFEPLFTWLKDQNKNSFVG WSTDWSPYADQSIKVRISLKSALGDKAYEWNDNEMYLFRSSVAYAMRQY FLKVKNQMILFGEEDVRVANLKPRISFNFFVTAPKNVSDIIPRTEVEKA IRMSRSRINDAFRLNDNSLEFLGIQPTLGPPNQPPVS EPKSCDKTHTAP ELLGGPSVFLFPPKPKDTLMISRTPEVTCVWDVSHEDPEVKFNWYVDG VEVHNAKTKPREEQYNSTYRVVSVLTVLHQDWLNGKEYKCKVSNKALPA PIEKTISKAKGQPREPQVYTLPPSRDELTKNQVSLTCLVKGFYPSDIAV EWESNGQPENNYKTTPPVLDSDGSFFLYSKLTVDKSRWQQGNVFSCSVM HEALHNHYTQKSLSLSPGKKKKPLDGEYFTLQIRGRERFEMFRELNEAL ELKDAQAGKEPG |
| ACE2(18-740) Ig-TD (SEQ ID NO: | QSTIEEQAKTFLDKFNHEAEDLFYQSSLASWNYNTNITEENVQNMNNAG DKWSAFLKEQSTLAQMYPLQEIQNLTVKLQLQALQQNGSSVLSEDKSKR LNTILNTMSTIYSTGKVCNPDNPQECLLLEPGLNEIMANSLDYNERLWA WESWRSEVGKQLRPLYEEYVVLKNEMARANHYEDYGDYWRGDYEVNGVD |
| 444) | GYDYSRGQLIEDVEHTFEEIKPLYEHLHAYVRAKLMNAYPSYISPIGCL PAHLLGDMWGRFWTNLYSLTVPFGQKPNIDVTDAMVDQAWDAQRIFKEA EKFFVSVGLPNMTQGFWENSMLTDPGNVQKAVCHPTAWDLGKGDFRILM CTKVTMDDFLTAHHEMGHIQYDMAYAAQPFLLRNGANEGFHEAVGEIMS LSAATPKHLKSIGLLSPDFQEDNETEINFLLKQALTIVGTLPFTYMLEK WRWMVFKGEIPKDQWMKKWWEMKREIVGVVEPVPHDETYCDPASLFHVS NDYSFIRYYTRTLYQFQFQEALCQAAKHEGPLHKCDISNSTEAGQKLFN MLRLGKSEPWTLALENVVGAKNMNVRPLLNYFEPLFTWLKDQNKNSFVG WSTDWSPYADQSIKVRISLKSALGDKAYEWNDNEMYLFRSSVAYAMRQY FLKVKNQMILFGEEDVRVANLKPRISFNFFVTAPKNVSDIIPRTEVEKA IRMSRSRINDAFRLNDNSLEFLGIQPTLGPPNQPPVS ASTKGPSVFPLA PSSKSTSGGTAALGCLVKDYFPEPVTVSWNSGALTSGVHTFPAVLQSSG LYSLSSVVTVPSSSLGTQTYICNVNHKPSNTKVDKKVEPKSCDKTHTCP PCPAPELLGGPSVFLFPPKPKDTLMISRTPEVTCVWDVSHEDPEVKFN WYVDGVEVHNAKTKPREEQYNSTYRVVSVLTVLHQDWLNGKEYKCKVSN KALPAPIEKTISKAKGQPREPQVYTLPPSRDELTKNQVSLTCLVKGFYP SDIAVEWESNGQPENNYKTTPPVLDSDGSFFLYSKLTVDKSRWQQGNVF SCSVMHEALHNHYTQKSLSLSPGKKKKPLDGEYFTLQIRGRERFEMFRE LNEALELKDAQAGKEPG |

[2557] Table 25. Amino acid sequences of immunoglobulin (Ig) binding domains. Sequences are shown without affinity tag but any of the affinity tags outlined in Table 22 can be included at the N- or C-terminus of the Ig binding domain. Each of the Ig binding domains can be linked together without flexible linker as shown in this table or optionally be linked together via a flexible linker. Examples of flexible linker sequences are shown in Table 26. C1-C3 domains are Ig binding domains from Protein G. EDABC domains are Ig binding domains from Protein A. B1-B5 domains are Ig binding domains from Protein L. Each Ig binding domain combination shown in this table can be formatted into different Quad formats by linking them to sequences shown in Table 27 or as outlined schematically in FIGS. 6A-D.

[2558] Each binding domain in this table may be used as a binding domain comprised by a polypeptide or multimer of the invention.

| SEQ ID | Ig binding domains | Sequence |
|---|---|---|
| 445 | C1-C3 | TYKLILNGKTLKGETTTEAVDAATAEKVFKQYANDNGVDG EWTYDDATKTFTVTETYKLVINGKTLKGETTTEAVDAATA EKVFKQYANDNGVDGEWTYDDATKTFTVTETYKLVINGKT LKGETTTKAVDAETAEKAFKQYANDNGVDGVWTYDDATKT FTVTE |
| 446 | C1 | TYKLILNGKTLKGETTTEAVDAATAEKVFKQYANDNGVDG EWTYDDATKTFTVTE |
| 447 | (C1)₂ | TYKLILNGKTLKGETTTEAVDAATAEKVFKQYANDNGVDG EWTYDDATKTFTVTETYKLILNGKTLKGETTTEAVDAATA EKVFKQYANDNGVDGEWTYDDATKTFTVTE |
| 448 | (C1)₃ | TYKLILNGKTLKGETTTEAVDAATAEKVFKQYANDNGVDG EWTYDDATKTFTVTETYKLILNGKTLKGETTTEAVDAATA EKVFKQYANDNGVDGEWTYDDATKTFTVTETYKLILNGKT LKGETTTEAVDAATAEKVFKQYANDNGVDGEWTYDDATKT FTVTE |
| 449 | C2 | TYKLVINGKTLKGETTTEAVDAATAEKVFKQYANDNGVDG EWTYDDATKTFTVTE |
| 450 | (C2)₂ | TYKLVINGKTLKGETTTEAVDAATAEKVFKQYANDNGVDG EWTYDDATKTFTVTETYKLVINGKTLKGETTTEAVDAATA EKVFKQYANDNGVDGEWTYDDATKTFTVTE |
| 451 | (C2)₃ | TYKLVINGKTLKGETTTEAVDAATAEKVFKQYANDNGVDG EWTYDDATKTFTVTETYKLVINGKTLKGETTTEAVDAATA EKVFKQYANDNGVDGEWTYDDATKTFTVTETYKLVINGKT LKGETTTEAVDAATAEKVFKQYANDNGVDGEWTYDDATKT FTVTE |
| 452 | EDABC | AQHDEAQQNAFYQVLNMPNLNADQRNGFIQSLKDDPSQSA NVLGEAQKLNDSQAPKADAQQNKFNKDQQSAFYEILNMPN LNEEQRNGFIQSLKDDPSQSTNVLGEAKKLNESQAPKADN NFNKEQQNAFYEILNMPNLNEEQRNGFIQSLKDDPSQSAN LLAEAKKLNESQAPKADNKFNKEQQNAFYEILHLPNLNEE QRNGFIQSLKDDPSQSANLLAEAKKLNDAQAPKADNKFNK EQQNAFYEILHLPNLTEEQRNGFIQSLKDDPSVSKEILAE AKKLNDAQAPK |
| 453 | D | ADAQQNKFNKDQQSAFYEILNMPNLNEEQRNGFIQSLKDD PSQSTNVLGEAKKLNESQAPK |
| 454 | (D)₂ | ADAQQNKFNKDQQSAFYEILNMPNLNEEQRNGFIQSLKDD PSQSTNVLGEAKKLNESQAPKADAQQNKFNKDQQSAFYEI LNMPNLNEEQRNGFIQSLKDDPSQSTNVLGEAKKLNESQA PK |
| 455 | (D)₃ | ADAQQNKFNKDQQSAFYEILNMPNLNEEQRNGFIQSLKDD PSQSTNVLGEAKKLNESQAPKADAQQNKFNKDQQSAFYEI LNMPNLNEEQRNGFIQSLKDDPSQSTNVLGEAKKLNESQA PKADAQQNKFNKDQQSAFYEILNMPNLNEEQRNGFIQSLK DDPSQSTNVLGEAKKLNESQAPKADAQQNKFNKDQQSAFY EILNMPNLNEEQRNGFIQSLKDDPSQSTNVLGEAKKLNES QAPK |
| 456 | B1-B5 | KEETPETPETDSEEEVTIKANLIFANGSTQTAEFKGTFEK ATSEAYAYADTLKKDNGEYTVDVADKGYTLNIKFAGKEKT PEEPKEEVTIKANLIYADGKTQTAEFKGTFEEATAEAYRY ADALKKDNGEYTVDVADKGYTLNIKFAGKEKTPEEPKEEV TIKANLIYADGKTQTAEFKGTFEEATAEAYRYADLLAKEN GKYTVDVADKGYTLNIKFAGKEKTPEEPKEEVTIKANLIY ADGKTQTAEFKGTFAEATAEAYRYADLLAKENGKYTADLE DGGYTINIRFAGKKVDEKPEEKEQVTIKENIYFEDGTVQT ATFKGTFAEATAEAYRYADLLSKEHGKYTADLEDGGYTIN IRFAG |
| 457 | B4 | KEKTPEEPKEEVTIKANLIYADGKTQTAEFKGTFAEATAE AYRYADLLAKENGKYTADLEDGGYTINIRFAG |
| 458 | (B4)₂ | KEKTPEEPKEEVTIKANLIYADGKTQTAEFKGTFAEATAE AYRYADLLAKENGKYTADLEDGGYTINIRFAGKEKTPEEP KEEVTIKANLIYADGKTQTAEFKGTFAEATAEAYRYADLL AKENGKYTADLEDGGYTINIRFAG |
| 459 | (B4)₃ | KEKTPEEPKEEVTIKANLIYADGKTQTAEFKGTFAEATAE AYRYADLLAKENGKYTADLEDGGYTINIRFAGKEKTPEEP KEEVTIKANLIYADGKTQTAEFKGTFAEATAEAYRYADLL AKENGKYTADLEDGGYTINIRFAGKEKTPEEPKEEVTIKA NLIYADGKTQTAEFKGTFAEATAEAYRYADLLAKENGKYT ADLEDGGYTINIRFAG |
| 460 | C1-D | TYKLILNGKTLKGETTTEAVDAATAEKVFKQYANDNGVDG EWTYDDATKTFTVTEADAQQNKFNKDQQSAFYEILNMPNL NEEQRNGFIQSLKDDPSQSTNVLGEAKKLNESQAPK |
| 461 | C1-B4 | TYKLILNGKTLKGETTTEAVDAATAEKVFKQYANDNGVDG EWTYDDATKTFTVTEKEKTPEEPKEEVTIKANLIYADGKT QTAEFKGTFAEATAEAYRYADLLAKENGKYTADLEDGGYT INIRFAG |
| 462 | C2-D | TYKLVINGKTLKGETTTEAVDAATAEKVFKQYANDNGVDG EWTYDDATKTFTVTEADAQQNKFNKDQQSAFYEILNMPNL NEEQRNGFIQSLKDDPSQSTNVLGEAKKLNESQAPK |
| 463 | C2-B4 | TYKLVINGKTLKGETTTEAVDAATAEKVFKQYANDNGVDG EWTYDDATKTFTVTEKEKTPEEPKEEVTIKANLIYADGKT QTAEFKGTFAEATAEAYRYADLLAKENGKYTADLEDGGYT INIRFAG |
| 464 | B4-D | KEKTPEEPKEEVTIKANLIYADGKTQTAEFKGTFAEATAE AYRYADLLAKENGKYTADLEDGGYTINIRFAGADAQQNKF |

TABLE 26

Examples of flexible peptide linkers

| SEQ ID | Linker | Sequence |
|---|---|---|
| 469 | D1 | KPEVIDASELTPAVT |
| 470 | DDAKK | DDAKK |
| 471 | (DDAKK)₂ | DDAKKDDAKK |
| 472 | (DDAKK)₃ | DDAKKDDAKKDDAKK |
| 473 | (DDAKK)₄ | DDAKKDDAKKDDAKKDDAKK |
| 474 | (DDAKK)₅ | DDAKKDDAKKDDAKKDDAKKDDAKK |
| 475 | (DDAKK)₆ | DDAKKDDAKKDDAKKDDAKKDDAKKDDAKK |
| 476 | GS | GS |
| 477 | GGGS | GGGS |
| 478 | SGGGGS | SGGGGS |
| 479 | GGSGGGGS | GGSGGGGS |
| 480 | GG(G4S)₂ | GGGGGGSGGGGS |
| 481 | G4S | GGGGS |
| 482 | (G4S)₂ | GGGGSGGGGS |
| 483 | (G4S)₃ | GGGGSGGGGSGGGGS |
| 484 | VPGV | VPGV |
| 485 | (VPGV)G | VPGVG |
| 486 | G(VPGV)G | GVPGVG |
| 487 | GVG(VPGV)G | GVGVPGVG |
| 488 | (VPGV)G(VPGV)G | VPGVGVPGVG |

TABLE 27

Amino acid sequences of different antibody and Quad backbone including tetramerization domain (TD). Any of the Ig binding domain sequence listed in Table 25 can be linked to any of these backbone to generate multimeric Ig capture proteins with multiple Ig binding domains. Inclusion of optional flexible linker/s are not included in the sequences in this table but can be included in additional iterations as shown schematically in FIGS. 6A-D

| SEQ ID | Name | Sequence |
|---|---|---|
| 489 | Heavy chain only Fc | EPKSCDKTHTCPPCPAPELLGGPSVFLFPPKPKDTLMISR TPEVTCVVVDVSHEDPEVKFNWYVDGVEVHNAKTKPREEQ YNSTYRVVSVLTVLHQDWLNGKEYKCKVSNKALPAPIEKT ISKAKGQPREPQVYTLPPSRDELTKNQVSLTCLVKGFYPS DIAVEWESNGQPENNYKTTPPVLDSDGSFFLYSKLTVDKS RWQQGNVFSCSVMHEALHNHYTQKSLSLSPGK |
| 490 | Heavy chain only Fc-TD | EPKSCDKTHTCPPCPAPELLGGPSVFLFPPKPKDTLMISR TPEVTCVVVDVSHEDPEVKFNWYVDGVEVHNAKTKPREEQ YNSTYRVVSVLTVLHQDWLNGKEYKCKVSNKALPAPIEKT ISKAKGQPREPQVYTLPPSRDELTKNQVSLTCLVKGFYPS DIAVEWESNGQPENNYKTTPPVLDSDGSFFLYSKLTVDKS RWQQGNVFSCSVMHEALHNHYTQKSLSLSPGKKKKPLDGE YFTLQIRGRERFEMFRELNEALELKDAQAGKEPG |
| 491 | IgG | EPKSCDKTHTCPPCPAPELLGGPSVFLFPPKPKDTLMISR TPEVTCVVVDVSHEDPEVKFNWYVDGVEVHNAKTKPREEQ YNSTYRVVSVLTVLHQDWLNGKEYKCKVSNKALPAPIEKT ISKAKGQPREPQVYTLPPSRDELTKNQVSLTCLVKGFYPS DIAVEWESNGQPENNYKTTPPVLDSDGSFFLYSKLTVDKS RWQQGNVFSCSVMHEALHNHYTQKSLSLSPGK |
| 492 | IgG1-TD | ASTKGPSVFPLAPSSKSTSGGTAALGCLVKDYFPEPVTVS WNSGALTSGVHTFPAVLQSSGLYSLSSVVTVPSSSLGTQT YICNVNHKPSNTKVDKKVEPKSCDKTHTCPPCPAPELLGG PSVFLFPPKPKDTLMISRTPEVTCVVVDVSHEDPEVKFNW YVDGVEVHNAKTKPREEQYNSTYRVVSVLTVLHQDWLNGK EYKCKVSNKALPAPIEKTISKAKGQPREPQVYTLPPSRDE LTKNQVSLTCLVKGFYPSDIAVEWESNGQPENNYKTTPPV LDSDGSFFLYSKLTVDKSRWQQGNVFSCSVMHEALHNHYT QKSLSLSPGKKKKPLDGEYFTLQIRGRERFEMFRELNEAL ELKDAQAGKEPG |
| 493 | Kappa constant | RTVAAPSVFIFPPSDEQLKSGTASVVCLLNNFYPREAKVQ WKVDNALQSGNSQESVTEQDSKDSTYSLSSTLTLSKADYE KHKVYACEVTHQGLSSPVTKSFNRGEC |
| 494 | Lambda | GQPKAAPSVTLFPPSSEELQANKATLVCLISDFYPGAVTV |
| | constant | AWKADSSPVKAGVETTTPSKQSNNKYAASSYLSLTPEQWK SHRSYSCQVTHEGSTVEKTVAPTECS |
| 495 | Fab-like-TD | ASTKGPSVFPLAPSSKSTSGGTAALGCLVKDYFPEPVTVS WNSGALTSGVHTFPAVLQSSGLYSLSSVVTVPSSSLGTQT YICNVNHKPSNTKVDKKVEPKSCDKTHTKKKPLDGEYFTL QIRGRERFEMFRELNEALELKDAQAGKEPG |
| 496 | Fab-like monomeric Ig-TD | ASTKGPSVFPLAPSSKSTSGGTAALGCLVKDYFPEPVTVS WNSGALTSGVHTFPAVLQSSGLYSLSSVVTVPSSSLGTQT YICNVNHKPSNTKVDKKVEPKSCDKTHTAPELLGGPSVFL FPPKPKDTLMISRTPEVTCVVVDVSHEDPEVKFNWYVDGV EVHNAKTKPREEQYNSTYRVVSVLTVLHQDWLNGKEYKCK VSNKALPAPIEKTISKAKGQPREPQVYTLPPSRDELTKNQ VSLTCLVKGFYPSDIAVEWESNGQPENNYKTTPPVLDSDG SFFLYSKLTVDKSRWQQGNVFSCSVMHEALHNHYTQKSLS LSPGKKKKPLDGEYFTLQIRGRERFEMFRELNEALELKDA QAGKEPG |
| 497 | Dimeric-TD | EPKSCDKTHTCPPCPAPELLGGKKKPLDGEYFTLQIRGRE RFEMFRELNEALELKDAQAGKEPG |
| 498 | Fab′like-TD | ASTKGPSVFPLAPSSKSTSGGTAALGCLVKDYFPEPVTVS WNSGALTSGVHTFPAVLQSSGLYSLSSVVTVPSSSLGTQT YICNVNHKPSNTKVDKKVEPKSCDKTHTCPPCPAPELLGG KKKPLDGEYFTLQIRGRERFEMFRELNEALELKDAQAGKE PG |
| 499 | monomeric Ig-TD | EPKSCDKTHTAPELLGGPSVFLFPPKPKDTLMISRTPEVT CVVVDVSHEDPEVKFNWYVDGVEVHNAKTKPREEQYNSTY RVVSVLTVLHQDWLNGKEYKCKVSNKALPAPIEKTISKAK GQPREPQVYTLPPSRDELTKNQVSLTCLVKGFYPSDIAVE WESNGQPENNYKTTPPVLDSDGSFFLYSKLTVDKSRWQQG NVFSCSVMHEALHNHYTQKSLSLSPGKKKKPLDGEYFTLQ IRGRERFEMFRELNEALELKDAQAGKEPG |

TABLE 28

Summary of IC₅₀ from In vitro neutralization assays

| SARS-CoV-2 Inhibitor | IC₅₀ (nM) | IC₅₀ (pM) |
|---|---|---|
| Q146/Q147 | 0.39 | 390.3 |
| Q146C/Q147 | 0.18 | 175.8 |
| Q158new | 0.45 | 449.4 |

TABLE 29

Summary of IC₅₀ from In vitro neutralization assay

| SARS-CoV-2 Inhibitor | IC₅₀ (nM) | IC₅₀ (pM) | % Inhibition nCoV RBD:huACE2 Fc |
|---|---|---|---|
| Q176 | Poor neutralizer | | 26.0 |
| Q177 | 0.0649 | 64.9 | 99.9 |
| Q178 | 0.1853 | 185.3 | 96.7 |
| Q179 | 0.0328 | 32.8 | 99.9 |
| Q180/Q182 | 0.0778 | 77.8 | 99.9 |
| Q181/Q182 | 0.0154 | 15.4 | 99.9 |
| Q183/Q182 | 0.0312 | 31.2 | 99.9 |
| Q184/Q182 | 0.0342 | 34.2 | 99.9 |
| Q185 | 0.0237 | 23.7 | 99.9 |
| Q186/Q182 | 0.0148 | 14.8 | 99.9 |
| BG mlg-TD | 0.0887 | 88.7 | 99.9 |
| FE mlg-TD | 0.0800 | 80.0 | 69.1 |

TABLE 30

Comparison of IC₅₀ values of Quads with lead SARS CoV-2 neutralizing antibodies reported by Hansen et al., 2020

| Antibody | ELISA Blocking | % Inhibition nCoV RBD:huACE2 Fc |
|---|---|---|
| | IC₅₀ (pM) Blocking Cov-2 RBD | |
| Q185 | 14.7 | 98.7 |
| Q186/Q182 | 8.3 | 97.8 |
| REGN10989 | 43.3 | 98 |
| REGN10987 | 231 | 95 |
| REGN10933 | 69.3 | 99 |
| REGN10934 | 63.6 | 96 |

TABLE 31

Figure/Quad Correlation Table

| Quads | Description | Figure No. |
|---|---|---|
| Q146/Q147 | CR3022-TD | 11-A |
| Q146A/Q147 | CR3022 mlg-TD | 11-B |
| Q146C/Q147 | CR3022 Ig-TD | 11-C |
| Q158new | ACE2 Ig-TD | 11-D |
| Q176 | VHH QB-GB | 12-A |
| Q177 | VHH QB-GB-TD | |
| Q178 | VHH QB-GB IgG | 12-B |
| Q179 | VHH QB-GB Ig-TD | 12-C |
| Q180/Q182 | VHH QB-GB Fab-like Ig | 12-D |
| Q181/Q182 | VHH QB-GB Fab-like Ig-TD | 12-E |
| Q183/Q183 | VHH QB-GB Fab-like TD | 12-F |
| Q184/Q182 | VHH QB-GB Fab-like mlg-TD | 12-G |
| Q185 | VHH QB-GB dimeric TD | 12-H |
| Q186/Q182 | VHH QB-GB Fab′-like TD | 12-I |
| QB-BG VHH | VHH | 12-0 |
| QB-BG mlg-TD | VHH mlg-TD | |
| QB-FE VHH | VHH | 12-P |
| QB-FE mlg-TD | VHH mlg-TD | |

[Q182 is the chain containing a CL]

[2559] Table 32: Amino acid sequences of further engineered tandem VHH multivalent Quads and Quad formats of clinical stage mAbs targeting SARS-CoV-2.

[2560] The sequences of binding domains (eg, VH and VL) for use in the present invention are underlined and are intended to be read as written (ie, as part of the full sequence including non-underlined part) or alternatively without the futher underlined sequence.

[2561] In an embodiment, the polypeptide of the invention comprises a sequence that is shown in bold in this Table 32. In an embodiment, the polypeptide of the invention comprises, in N- to C-terminal direction, a binding domain or peptide; and a sequence that is shown in bold in this Table 32. The binding domain may be any binding domain disclosed herein, eg, a VH, VL, VHH, dAb or scFv.

[2562] The present disclosure further comprises each underlined sequence without the following bold sequence, eg, to provide a binding site or domain for use in any polypeptide or mutimer of the invention herein. The present disclosure further comprises each bold sequence without the immediately preceding underlined sequence, eg, to for use in any polypeptide or mutimer of the invention herein (such as as part of a polypeptide comprising a binding domain or peptide immediately preceding the bold sequence).

| SEQ ID No: | Quad Name | AMINO ACID SEQUENCE |
|---|---|---|
| 232 | Q177B | QVQLQESGGGLVQAGGSLRLSCAASGRTFSEYAMGWFRQAPGKE REFVATISWSGGSTYYTDSVKGRFTISRDNAKNTVYLQMNSLKP DDTAVYYCAAAGLGTVVSEWDYDYDYWGQGTQVTVSSGGSGGSQ VQLQESGGGLVQAGGSLRLSCAASGRTFSEYAMGWFRQAPGKER EFVATISWSGGSTYYTDSVKGRFTISRDNAKNTVYLQMNSLKPD |
| | | DTAVYYCAAAGLGTVVSEWDYDYDYWGQGTQVTVSS GGGGSGGG GSKKKPLDGEYFTLQIRGRERFEMFRELNEALELKDAQAGKEPG |
| 233 | Q177C | QVQLQESGGGLVQAGGSLRLSCAASGRTFSEYAMGWFRQAPGKE REFVATISWSGGSTYYTDSVKGRFTISRDNAKNTVYLQMNSLKP DDTAVYYCAAAGLGTVVSEWDYDYDYWGQGTQVTVSSGGSGGSQ VQLQESGGGLVQAGGSLRLSCVASGSIFSINAMDWYRQAPGKQR ELVAGITSGGSTNYGDFVKGRFTISRDNAKNTVYLQMDSLKPED TAVYYCAAEVGGWGPPRPDYWGHGTQVTVSSGGGGSGGGGSKKK PLDGEYFTLQIRGRERFEMFRELNEALELKDAQAGKEPG |
| 234 | Q179B | QVQLQESGGGLVQAGGSLRLSCAASGRTFSEYAMGWFRQAPGKE REFVATISWSGGSTYYTDSVKGRFTISRDNAKNTVYLQMNSLKP DDTAVYYCAAAGLGTVVSEWDYDYDYWGQGTQVTVSSGGSGGSQ VQLQESGGGLVQAGGSLRLSCAASGRTFSEYAMGWFRQAPGKER EFVATISWSGGSTYYTDSVKGRFTISRDNAKNTVYLQMNSLKPD DTAVYYCAAAGLGTVVSEWDYDYDYWGQGTQVTVSSGGGGSGGG GSEPKSCDKTHTCPPCPAPELLGGPSVFLFPPKPKDTLMISRTP EVTCVWDVSHEDPEVKFNWYVDGVEVHNAKTKPREEQYNSTYR WSVLTVLHQDWLNGKEYKCKVSNKALPAPIEKTISKAKGQPRE PQVYTLPPSRDELTKNQVSLTCLVKGFYPSDIAVEWESNGQPEN NYKTTPPVLDSDGSFFLYSKLTVDKSRWQQGNVFSCSVMHEALH NHYTQKSLSLSPGKKKKPLDGEYFTLQIRGRERFEMFRELNEAL ELKDAQAGKEPG |
| 235 | Q179C | QVQLQESGGGLVQAGGSLRLSCAASGRTFSEYAMGWFRQAPGKE REFVATISWSGGSTYYTDSVKGRFTISRDNAKNTVYLQMNSLKP DDTAVYYCAAAGLGTVVSEWDYDYDYWGQGTQVTVSSGGSGGSQ VQLQESGGGLVQAGGSLRLSCVASGSIFSINAMDWYRQAPGKQR ELVAGITSGGSTNYGDFVKGRFTISRDNAKNTVYLQMDSLKPED TAVYYCAAEVGGWGPPRPDYWGHGTQVTVSSGGGGSGGGGSEPK SCDKTHTCPPCPAPELLGGPSVFLFPPKPKDTLMISRTPEVTCV VVDVSHEDPEVKFNWYVDGVEVHNAKTKPREEQYNSTYRVVSVL TVLHQDWLNGKEYKCKVSNKALPAPIEKTISKAKGQPREPQVYT LPPSRDELTKNQVSLTCLVKGFYPSDIAVEWESNGQPENNYKTT PPVLDSDGSFFLYSKLTVDKSRWQQGNVFSCSVMHEALHNHYTQ KSLSLSPGKKKKPLDGEYFTLQIRGRERFEMFRELNEALELKDA |
| | | QAGKEPG |
| 236 | Q185B | QVQLQESGGGLVQAGGSLRLSCAASGRTFSEYAMGWFRQAPGKE REFVATISWSGGSTYYTDSVKGRFTISRDNAKNTVYLQMNSLKP DDTAVYYCAAAGLGTVVSEWDYDYDYWGQGTQVTVSSGGSGGSQ VQLQESGGGLVQAGGSLRLSCAASGRTFSEYAMGWFRQAPGKER EFVATISWSGGSTYYTDSVKGRFTISRDNAKNTVYLQMNSLKPD DTAVYYCAAAGLGTVVSEWDYDYDYWGQGTQVTVSSGGGGSGGG GSEPKSCDKTHTCPPCPAPELLGGKKKPLDGEYFTLQIRGRERF EMFRELNEALELKDAQAGKEPG |
| 237 | Q185C | QVQLQESGGGLVQAGGSLRLSCAASGRTFSEYAMGWFRQAPGKE REFVATISWSGGSTYYTDSVKGRFTISRDNAKNTVYLQMNSLKP DDTAVYYCAAAGLGTVVSEWDYDYDYWGQGTQVTVSSGGSGGSQ VQLQESGGGLVQAGGSLRLSCVASGSIFSINAMDWYRQAPGKQR ELVAGITSGGSTNYGDFVKGRFTISRDNAKNTVYLQMDSLKPED TAVYYCAAEVGGWGPPRPDYWGHGTQVTVSSGGGGSGGGGSEPK SCDKTHTCPPCPAPELLGGKKKPLDGEYFTLQIRGRERFEMFRE LNEALELKDAQAGKEPG |
| 238 | Q203 | QVQLQESGGGLVQAGGSLRLSCAASGRTFSEYAMGWFRQAPGKE REFVATISWSGGSTYYTDSVKGRFTISRDNAKNTVYLQMNSLKP DDTAVYYCAAAGLGTVVSEWDYDYDYWGQGTQVTVSSGGSGGSQ VQLQESGGGLVQAGGSLRLSCAASGRTFSEYAMGWFRQAPGKER EFVATISWSGGSTYYTDSVKGRFTISRDNAKNTVYLQMNSLKPD DTAVYYCAAAGLGTVVSEWDYDYDYWGQGTQVTVSSGGGGSGGG GSASTKGPSVFPLAPSSKSTSGGTAALGCLVKDYFPEPVTVSWN SGALTSGVHTFPAVLQSSGLYSLSSVVTVPSSSLGTQTYICNVN HKPSNTKVDKKVEPKSCDKTHTKKKPLDGEYFTLQIRGRERFEM FRELNEALELKDAQAGKEPG |
| 239 | Q204 | QVQLQESGGGLVQAGGSLRLSCAASGRTFSEYAMGWFRQAPGKE REFVATISWSGGSTYYTDSVKGRFTISRDNAKNTVYLQMNSLKP DDTAVYYCAAAGLGTVVSEWDYDYDYWGQGTQVTVSSGGSGGSQ VQLQESGGGLVQAGGSLRLSCVASGSIFSINAMDWYRQAPGKQR ELVAGITSGGSTNYGDFVKGRFTISRDNAKNTVYLQMDSLKPED TAVYYCAAEVGGWGPPRPDYWGHGTQVTVSSGGGGSGGGGSAST KGPSVFPLAPSSKSTSGGTAALGCLVKDYFPEPVTVSWNSGALT |
| | | SGVHTFPAVLQSSGLYSLSSVVTVPSSSLGTQTYICNVNHKPSN TKVDKKVEPKSCDKTHTKKKPLDGEYFTLQIRGRERFEMFRELN EALELKDAQAGKEPG |
| 240 | Q205 | QVQLQESGGGLVQAGGSLRLSCAASGRTFSEYAMGWFRQAPGKE REFVATISWSGGSTYYTDSVKGRFTISRDNAKNTVYLQMNSLKP DDTAVYYCAAAGLGTVVSEWDYDYDYWGQGTQVTVSSGGSGGSQ VQLQESGGGLVQAGGSLRLSCAASGRTFSEYAMGWFRQAPGKER EFVATISWSGGSTYYTDSVKGRFTISRDNAKNTVYLQMNSLKPD DTAVYYCAAAGLGTVVSEWDYDYDYWGQGTQVTVSSGGGGSGGG GSKRTVAAPSVFIFPPSDEQLKSGTASWCLLNNFYPREAKVQW KVDNALQSGNSQESVTEQDSKDSTYSLSSTLTLSKADYEKHKVY ACEVTHQGLSSPVTKSFNRGEC |
| 241 | Q177D | QVQLQESGGGLVQAGGSLRLSCAASGRTFSEYAMGWFRQAPGKE REFVATISWSGGSTYYTDSVKGRFTISRDNAKNTVYLQMNSLKP DDTAVYYCAAAGLGTVVSEWDYDYDYWGQGTQVTVSSGGSGGSQ VQLQESGGGLVQAGGSLRLSCAASGRTFSEYAMGWFRQAPGKER EFVATISWSGGSTYYTDSVKGRFTISRDNAKNTVYLQMNSLKPD DTAVYYCAAAGLGTVVSEWDYDYDYWGQGTQVTVSSGGGGSGGG GSKKKPLDGEYFTLQIRGRERFEMFRELNEALELKDAQAGKEPG GGGGSGGGGSQVQLQESGGGLVQAGGSLRLSCAASGRTFSEYAM GWFRQAPGKEREFVATISWSGGSTYYTDSVKGRFTISRDNAKNT VYLQMNSLKPDDTAVYYCAAAGLGTVVSEWDYDYDYWGQGTQVT VSS |
| 242 | Q177E | QVQLQESGGGLVQAGGSLRLSCAASGRTFSEYAMGWFRQAPGKE REFVATISWSGGSTYYTDSVKGRFTISRDNAKNTVYLQMNSLKP DDTAVYYCAAAGLGTVVSEWDYDYDYWGQGTQVTVSSGGSGGSQ VQLQESGGGLVQAGGSLRLSCAASGRTFSEYAMGWFRQAPGKER EFVATISWSGGSTYYTDSVKGRFTISRDNAKNTVYLQMNSLKPD DTAVYYCAAAGLGTVVSEWDYDYDYWGQGTQVTVSSGGGGSGGG GSKKKPLDGEYFTLQIRGRERFEMFRELNEALELKDAQAGKEPG GGGGSGGGGSQVQLQESGGGLVQAGGSLRLSCAASGRTFSEYAM GWFRQAPGKEREFVATISWSGGSTYYTDSVKGRFTISRDNAKNT VYLQMNSLKPDDTAVYYCAAAGLGTVVSEWDYDYDYWGQGTQVT VSSGGSGGSQVQLQESGGGLVQAGGSLRLSCAASGRTFSEYAMG |
| | | WFRQAPGKEREFVATISWSGGSTYYTDSVKGRFTISRDNAKNTV YLQMNSLKPDDTAVYYCAAAGLGTVVSEWDYDYDYWGQGTQVTV SS |
| 243 | Q185D | QVQLQESGGGLVQAGGSLRLSCAASGRTFSEYAMGWFRQAPGKE REFVATISWSGGSTYYTDSVKGRFTISRDNAKNTVYLQMNSLKP DDTAVYYCAAAGLGTVVSEWDYDYDYWGQGTQVTVSSGGSGGSQ VQLQESGGGLVQAGGSLRLSCAASGRTFSEYAMGWFRQAPGKER EFVATISWSGGSTYYTDSVKGRFTISRDNAKNTVYLQMNSLKPD DTAVYYCAAAGLGTVVSEWDYDYDYWGQGTQVTVSSGGGGSGGG GSEPKSCDKTHTCPPCPAPELLGGKKKPLDGEYFTLQIRGRERF EMFRELNEALELKDAQAGKEPGGGGGSGGGGSQVQLQESGGGLV QAGGSLRLSCAASGRTFSEYAMGWFRQAPGKEREFVATISWSGG STYYTDSVKGRFTISRDNAKNTVYLQMNSLKPDDTAVYYCAAAG LGTVVSEWDYDYDYWGQGTQVTVSS |
| 244 | Q185E | QVQLQESGGGLVQAGGSLRLSCAASGRTFSEYAMGWFRQAPGKE REFVATISWSGGSTYYTDSVKGRFTISRDNAKNTVYLQMNSLKP DDTAVYYCAAAGLGTVVSEWDYDYDYWGQGTQVTVSSGGSGGSQ VQLQESGGGLVQAGGSLRLSCAASGRTFSEYAMGWFRQAPGKER EFVATISWSGGSTYYTDSVKGRFTISRDNAKNTVYLQMNSLKPD DTAVYYCAAAGLGTVVSEWDYDYDYWGQGTQVTVSSGGGGSGGG GSEPKSCDKTHTCPPCPAPELLGGKKKPLDGEYFTLQIRGRERF EMFRELNEALELKDAQAGKEPGGGGGSGGGGSQVQLQESGGGLV QAGGSLRLSCAASGRTFSEYAMGWFRQAPGKEREFVATISWSGG STYYTDSVKGRFTISRDNAKNTVYLQMNSLKPDDTAVYYCAAAG LGTVVSEWDYDYDYWGQGTQVTVSSGGSGGSQVQLQESGGGLVQ AGGSLRLSCAASGRTFSEYAMGWFRQAPGKEREFVATISWSGGS TYYTDSVKGRFTISRDNAKNTVYLQMNSLKPDDTAVYYCAAAGL GTVVSEWDYDYDYWGQGTQVTVSS |
| 245 | Q209 | QVQLQESGGGLVQAGGSLRLSCAASGRTFSEYAMGWFRQAPGKE REFVATISWSGGSTYYTDSVKGRFTISRDNAKNTVYLQMNSLKP DDTAVYYCAAAGLGTVVSEWDYDYDYWGQGTQVTVSSGGSGGSQ VQLQESGGGLVQAGGSLRLSCAASGRTFSEYAMGWFRQAPGKER EFVATISWSGGSTYYTDSVKGRFTISRDNAKNTVYLQMNSLKPD DTAVYYCAAAGLGTVVSEWDYDYDYWGQGTQVTVSSGGGGSGGG |
| | | GSASTKGPSVFPLAPSSKSTSGGTAALGCLVKDYFPEPVTVSWN SGALTSGVHTFPAVLQSSGLYSLSSVVTVPSSSLGTQTYICNVN HKPSNTKVDKKVEPKSCDKTHTKKKPLDGEYFTLQIRGRERFEM FRELNEALELKDAQAGKEPGGGGGSGGGGSQVQLQESGGGLVQA GGSLRLSCAASGRTFSEYAMGWFRQAPGKEREFVATISWSGGST YYTDSVKGRFTISRDNAKNTVYLQMNSLKPDDTAVYYCAAAGLG TVVSEWDYDYDYWGQGTQVTVSSGGSGGSQVQLQESGGGLVQAG GSLRLSCAASGRTFSEYAMGWFRQAPGKEREFVATISWSGGSTY YTDSVKGRFTISRDNAKNTVYLQMNSLKPDDTAVYYCAAAGLGT VVSEWDYDYDYWGQGTQVTVSS |
| 246 | Q210 | QVQLQESGGGLVQAGGSLRLSCAASGRTFSEYAMGWFRQAPGKE REFVATISWSGGSTYYTDSVKGRFTISRDNAKNTVYLQMNSLKP DDTAVYYCAAAGLGTVVSEWDYDYDYWGQGTQVTVSSGGSGGSQ VQLQESGGGLVQAGGSLRLSCAASGRTFSEYAMGWFRQAPGKER EFVATISWSGGSTYYTDSVKGRFTISRDNAKNTVYLQMNSLKPD DTAVYYCAAAGLGTVVSEWDYDYDYWGQGTQVTVSSGGGGSGGG GSASTKGPSVFPLAPSSKSTSGGTAALGCLVKDYFPEPVTVSWN SGALTSGVHTFPAVLQSSGLYSLSSVVTVPSSSLGTQTYICNVN HKPSNTKVDKKVEPKSCDKTHTCPPCPAPELLGGPSVFLFPPKP KDTLMISRTPEVTCVWDVSHEDPEVKFNWYVDGVEVHNAKTKP REEQYNSTYRWSVLTVLHQDWLNGKEYKCKVSNKALPAPIEKT ISKAKGQPREPQVYTLPPSRDELTKNQVSLTCLVKGFYPSDIAV EWESNGQPENNYKTTPPVLDSDGSFFLYSKLTVDKSRWQQGNVF SCSVMHEALHNHYTQKSLSLSPGKKKKPLDGEYFTLQIRGRERF EMFRELNEALELKDAQAGKE PG |
| 247 | Q211 | QVQLQESGGGLVQAGGSLRLSCAASGRTFSEYAMGWFRQAPGKE REFVATISWSGGSTYYTDSVKGRFTISRDNAKNTVYLQMNSLKP DDTAVYYCAAAGLGTVVSEWDYDYDYWGQGTQVTVSSGGSGGSQ VQLQESGGGLVQAGGSLRLSCVASGSIFSINAMDWYRQAPGKQR ELVAGITSGGSTNYGDFVKGRFTISRDNAKNTVYLQMDSLKPED TAVYYCAAEVGGWGPPRPDYWGHGTQVTVSSGGGGSGGGGSAST KGPSVFPLAPSSKSTSGGTAALGCLVKDYFPEPVTVSWNSGALT SGVHTFPAVLQSSGLYSLSSVVTVPSSSLGTQTYICNVNHKPSN TKVDKKVEPKSCDKTHTCPPCPAPELLGGPSVFLFPPKPKDTLM ISRTPEVTCVWDVSHEDPEVKFNWYVDGVEVHNAKTKPREEQY |
| | | NSTYRVVSVLTVLHQDWLNGKEYKCKVSNKALPAPIEKTISKAK GQPREPQVYTLPPSRDELTKNQVSLTCLVKGFYPSDIAVEWESN GQPENNYKTTPPVLDSDGSFFLYSKLTVDKSRWQQGNVFSCSVM HEALHNHYTQKSLSLSPGKKKKPLDGEYFTLQIRGRERFEMFRE LNEALELKDAQAGKEPG |
| 248 | Q212 | QVQLQESGGGLVQAGGSLRLSCAASGRTFSEYAMGWFRQAPGKE REFVATISWSGGSTYYTDSVKGRFTISRDNAKNTVYLQMNSLKP DDTAVYYCAAAGLGTVVSEWDYDYDYWGQGTQVTVSSGGSGGSQ VQLQESGGGLVQAGGSLRLSCAASGRTFSEYAMGWFRQAPGKER EFVATISWSGGSTYYTDSVKGRFTISRDNAKNTVYLQMNSLKPD DTAVYYCAAAGLGTVVSEWDYDYDYWGQGTQVTVSSGGGGSGGG GSASTKGPSVFPLAPSSKSTSGGTAALGCLVKDYFPEPVTVSWN SGALTSGVHTFPAVLQSSGLYSLSSVVTVPSSSLGTQTYICNVN HKPSNTKVDKKVEPKSCDKTHTCPPCPAPELLGGKKKPLDGEYF TLQIRGRERFEMFRELNEALELKDAQAGKEPG |
| 249 | Q213 | QVQLQESGGGLVQAGGSLRLSCAASGRTFSEYAMGWFRQAPGKE REFVATISWSGGSTYYTDSVKGRFTISRDNAKNTVYLQMNSLKP DDTAVYYCAAAGLGTVVSEWDYDYDYWGQGTQVTVSSGGSGGSQ VQLQESGGGLVQAGGSLRLSCVASGSIFSINAMDWYRQAPGKQR ELVAGITSGGSTNYGDFVKGRFTISRDNAKNTVYLQMDSLKPED TAVYYCAAEVGGWGPPRPDYWGHGTQVTVSSGGGGSGGGGSAST KGPSVFPLAPSSKSTSGGTAALGCLVKDYFPEPVTVSWNSGALT SGVHTFPAVLQSSGLYSLSSVVTVPSSSLGTQTYICNVNHKPSN TKVDKKVEPKSCDKTHTCPPCPAPELLGGKKKPLDGEYFTLQIR GRERFEMFRELNEALELKDAQAGKEPG |
| 250 | REGN1098 7 Ig-TD | QVQLVESGGGVVQPGRSLRLSCAASGFTFSNYAMYWVRQAPGKG LEWVAVISYDGSNKYYADSVKGRFTISRDNSKNTLYLQMNSLRT EDTAVYYCASGSDYGDYLLVYWGQGTLVTVSS ASTKGPSVFPLA PSSKSTSGGTAALGCLVKDYFPEPVTVSWNSGALTSGVHTFPAV LQSSGLYSLSSVVTVPSSSLGTQTYICNVNHKPSNTKVDKKVEP KSCDKTHTCPPCPAPELLGGPSVFLFPPKPKDTLMISRTPEVTC VWDVSHEDPEVKFNWYVDGVEVHNAKTKPREEQYNSTYRWSV LTVLHQDWLNGKEYKCKVSNKALPAPIEKTISKAKGQPREPQVY TLPPSREEMTKNQVSLTCLVKGFYPSDIAVEWESNGQPENNYKT |
| | | TPPVLDSDGSFFLYSKLTVDKSRWQQGNVFSCSVMHEALHNHYT QKSLSLSPGKKKKPLDGEYFTLQIRGRERFEMFRELNEALELKD AQAGKEPG |
| 251 | REGN1098 7 mIg-TD | QVQLVESGGGVVQPGRSLRLSCAASGFTFSNYAMYWVRQAPGKG LEWVAVISYDGSNKYYADSVKGRFTISRDNSKNTLYLQMNSLRT EDTAVYYCASGSDYGDYLLVYWGQGTLVTVSS ASTKGPSVFPLA PSSKSTSGGTAALGCLVKDYFPEPVTVSWNSGALTSGVHTFPAV LQSSGLYSLSSVVTVPSSSLGTQTYICNVNHKPSNTKVDKKVEP KSCDKTHTAPELLGGPSVFLFPPKPKDTLMISRTPEVTCVVVDV SHEDPEVKFNWYVDGVEVHNAKTKPREEQYNSTYRWSVLTVLH QDWLNGKEYKCKVSNKALPAPIEKTISKAKGQPREPQVYTLPPS RDELTKNQVSLTCLVKGFYPSDIAVEWESNGQPENNYKTTPPVL DSDGSFFLYSKLTVDKSRWQQGNVFSCSVMHEALHNHYTQKSLS LSPGKKKKPLDGEYFTLQIRGRERFEMFRELNEALELKDAQAGK EPG |
| 252 | REGN1098 7 Fab-TD | QVQLVESGGGVVQPGRSLRLSCAASGFTFSNYAMYWVRQAPGKG LEWVAVISYDGSNKYYADSVKGRFTISRDNSKNTLYLQMNSLRT EDTAVYYCASGSDYGDYLLVYWGQGTLVTVSS ASTKGPSVFPLA PSSKSTSGGTAALGCLVKDYFPEPVTVSWNSGALTSGVHTFPAV LQSSGLYSLSSVVTVPSSSLGTQTYICNVNHKPSNTKVDKKVEP KSCDKTHTKKKPLDGEYFTLQIRGRERFEMFRELNEALELKDAQ AGKEPG |
| 253 | REGN1098 7 Lambda LC | QSALTQPASVSGSPGQSITISCTGTSSDVGGYNYVSWYQQHPGK APKLMIYDVSKRPSGVSNRFSGSKSGNTASLTISGLQSEDEADY YCNSLTSISTWVFGGGTKLTVL GQPKAAPSVTLFPPSSEELQAN KATLVCLISDFYPGAVTVAWKADSSPVKAGVETTTPSKQSNNKY AASSYLSLTPEQWKSHRSYSCQVTHEGSTVEKTVAPTECS |
| 254 | REGN1093 3 Ig-TD | QVQLVESGGGLVKPGGSLRLSCAASGFTFSDYYMSWIRQAPGKG LEWVSYITYSGSTIYYADSVKGRFTISRDNAKSSLYLQMNSLRA EDTAVYYCARDRGTTMVPFDYWGQGTLVTVSS ASTKGPSVFPLA PSSKSTSGGTAALGCLVKDYFPEPVTVSWNSGALTSGVHTFPAV LQSSGLYSLSSVVTVPSSSLGTQTYICNVNHKPSNTKVDKKVEP KSCDKTHTCPPCPAPELLGGPSVFLFPPKPKDTLMISRTPEVTC VWDVSHEDPEVKFNWYVDGVEVHNAKTKPREEQYNSTYRWSV |
| | | LTVLHQDWLNGKEYKCKVSNKALPAPIEKTISKAKGQPREPQVY TLPPSREEMTKNQVSLTCLVKGFYPSDIAVEWESNGQPENNYKT TPPVLDSDGSFFLYSKLTVDKSRWQQGNVFSCSVMHEALHNHYT QKSLSLSPGKKKKPLDGEYFTLQIRGRERFEMFRELNEALELKD AQAGKEPG |
| 255 | REGN1093 3 mIg-TD | QVQLVESGGGLVKPGGSLRLSCAASGFTFSDYYMSWIRQAPGKG LEWVSYITYSGSTIYYADSVKGRFTISRDNAKSSLYLQMNSLRA EDTAVYYCARDRGTTMVPFDYWGQGTLVTVSS ASTKGPSVFPLA PSSKSTSGGTAALGCLVKDYFPEPVTVSWNSGALTSGVHTFPAV LQSSGLYSLSSVVTVPSSSLGTQTYICNVNHKPSNTKVDKKVEP KSCDKTHTAPELLGGPSVFLFPPKPKDTLMISRTPEVTCVVVDV SHEDPEVKFNWYVDGVEVHNAKTKPREEQYNSTYRWSVLTVLH QDWLNGKEYKCKVSNKALPAPIEKTISKAKGQPREPQVYTLPPS RDELTKNQVSLTCLVKGFYPSDIAVEWESNGQPENNYKTTPPVL DSDGSFFLYSKLTVDKSRWQQGNVFSCSVMHEALHNHYTQKSLS LSPGKKKKPLDGEYFTLQIRGRERFEMFRELNEALELKDAQAGK EPG |
| 256 | REGN1093 3 Fab-TD | QVQLVESGGGLVKPGGSLRLSCAASGFTFSDYYMSWIRQAPGKG LEWVSYITYSGSTIYYADSVKGRFTISRDNAKSSLYLQMNSLRA EDTAVYYCARDRGTTMVPFDYWGQGTLVTVSS ASTKGPSVFPLA PSSKSTSGGTAALGCLVKDYFPEPVTVSWNSGALTSGVHTFPAV LQSSGLYSLSSVVTVPSSSLGTQTYICNVNHKPSNTKVDKKVEP KSCDKTHTKKKPLDGEYFTLQIRGRERFEMFRELNEALELKDAQ AGKEPG |
| 257 | REGN1093 3 Kappa LC | DIQMTQSPSSLSASVGDRVTITCQASQDITNYLNWYQQKPGKAP KLLIYAASNLETGVPSRFSGSGSGTDFTFTISGLQPEDIATYYC QQYDNLPLTFGGGTKVEIK RTVAAPSVFIFPPSDEQLKSGTASV VCLLNNFYPREAKVQWKVDNALQSGNSQESVTEQDSKDSTYSLS STLTLSKADYEKHKVYACEVTHQGLSSPVTKSFNRGEC |
| 258 | CB6 Ig-TD | EVQLVESGGGLVQPGGSLRLSCAASGFTVSSNYMSWVRQAPGKG LEWVSVIYSGGSTFYADSVKGRFTISRDNSMNTLFLQMNSLRAE DTAVYYCARVLPMYGDYLDYWGQGTLVTVSS ASTKGPSVFPLAP SSKSTSGGTAALGCLVKDYFPEPVTVSWNSGALTSGVHTFPAVL QSSGLYSLSSVVTVPSSSLGTQTYICNVNHKPSNTKVDKKVEPK |
| | | SCDKTHTCPPCPAPELLGGPSVFLFPPKPKDTLMISRTPEVTCV VVDVSHEDPEVKFNWYVDGVEVHNAKTKPREEQYNSTYRVVSVL TVLHQDWLNGKEYKCKVSNKALPAPIEKTISKAKGQPREPQVYT LPPSREEMTKNQVSLTCLVKGFYPSDIAVEWESNGQPENNYKTT PPVLDSDGSFFLYSKLTVDKSRWQQGNVFSCSVMHEALHNHYTQ KSLSLSPGKKKKPLDGEYFTLQIRGRERFEMFRELNEALELKDA QAGKEPG |
| 259 | CB6 mIg-TD | EVQLVESGGGLVQPGGSLRLSCAASGFTVSSNYMSWVRQAPGKG LEWVSVIYSGGSTFYADSVKGRFTISRDNSMNTLFLQMNSLRAE DTAVYYCARVLPMYGDYLDYWGQGTLVTVSS ASTKGPSVFPLAP SSKSTSGGTAALGCLVKDYFPEPVTVSWNSGALTSGVHTFPAVL QSSGLYSLSSVVTVPSSSLGTQTYICNVNHKPSNTKVDKKVEPK SCDKTHTAPELLGGPSVFLFPPKPKDTLMISRTPEVTCVVVDVS HEDPEVKFNWYVDGVEVHNAKTKPREEQYNSTYRWSVLTVLHQ DWLNGKEYKCKVSNKALPAPIEKTISKAKGQPREPQVYTLPPSR DELTKNQVSLTCLVKGFYPSDIAVEWESNGQPENNYKTTPPVLD SDGSFFLYSKLTVDKSRWQQGNVFSCSVMHEALHNHYTQKSLSL SPGKKKKPLDGEYFTLQIRGRERFEMFRELNEALELKDAQAGKE PG |
| 260 | CB6 Fab-TD | EVQLVESGGGLVQPGGSLRLSCAASGFTVSSNYMSWVRQAPGKG LEWVSVIYSGGSTFYADSVKGRFTISRDNSMNTLFLQMNSLRAE DTAVYYCARVLPMYGDYLDYWGQGTLVTVSS ASTKGPSVFPLAP SSKSTSGGTAALGCLVKDYFPEPVTVSWNSGALTSGVHTFPAVL QSSGLYSLSSVVTVPSSSLGTQTYICNVNHKPSNTKVDKKVEPK SCDKTHTKKKPLDGEYFTLQIRGRERFEMFRELNEALELKDAQA GKEPG |
| 261 | CB6 Kappa LC | DIVMTQSPSSLSASVGDRVTITCRASQSISRYLNWYQQKPGKAP KLLIYAASSLQSGVPSRFSGSGSGTDFTLTISSLQPEDFATYYC QQSYSTPPEYTFGQGTKLEIK RTVAAPSVFIFPPSDEQLKSGTA SVVCLLNNFYPREAKVQWKVDNALQSGNSQESVTEQDSKDSTYS LSSTLTLSKADYEKHKVYACEVTHQGLSSPVTKSFNRGEC |
| 262 | >REGN109 87 VH | QVQLVESGGGVVQPGRSLRLSCAASGFTFSNYAMYWVRQAPGKG LEWVAVISYDGSNKYYADSVKGRFTISRDNSKNTLYLQMNSLRT |
| | | EDTAVYYCASGSDYGDYLLVYWGQGTLVTVSS |
| 263 | >REGN109 87 VL | QSALTQPASVSGSPGQSITISCTGTSSDVGGYNYVSWYQQHPGK APKLMIYDVSKRPSGVSNRFSGSKSGNTASLTISGLQSEDEADY YCNSLTSISTWVFGGGTKLTVL |
| 264 | >REGN109 33 VH | QVQLVESGGGLVKPGGSLRLSCAASGFTFSDYYMSWIRQAPGKG LEWVSYITYSGSTIYYADSVKGRFTISRDNAKSSLYLQMNSLRA EDTAVYYCARDRGTTMVPFDYWGQGTLVTVSS |
| 265 | >REGN109 33 VL | DIQMTQSPSSLSASVGDRVTITCQASQDITNYLNWYQQKPGKAP KLLIYAASNLETGVPSRFSGSGSGTDFTFTISGLQPEDIATYYC QQYDNLPLTFGGGTKVEIK |
| 266 | >CB6 VH | EVQLVESGGGLVQPGGSLRLSCAASGFTVSSNYMSWVRQAPGKG LEWVSVIYSGGSTFYADSVKGRFTISRDNSMNTLFLQMNSLRAE DTAVYYCARVLPMYGDYLDYWGQGTLVTVSS |
| 267 | >CB6 VL | DIVMTQSPSSLSASVGDRVTITCRASQSISRYLNWYQQKPGKAP KLLIYAASSLQSGVPSRFSGSGSGTDFTLTISSLQPEDFATYYC QQSYSTPPEYTFGQGTKLEIK |
| 287 | Q206 | QVQLQESGGGLVQAGGSLRLSCAASGRTFSEYAMGWFRQAP GKEREFVATISWSGGSTYYTDSVKGRFTISRDNAKNTVYLQ MNSLKPDDTAVYYCAAAGLGTVVSEWDYDYDYWGQGTQVTV SSGGSGGSQVQLQESGGGLVQAGGSLRLSCVASGSIFSINA MDWYRQAPGKQRELVAGITSGGSTNYGDFVKGRFTISRDNA KNTVYLQMDSLKPEDTAVYYCAAEVGGWGPPRPDYWGHGTQ VTVSSGGGGSGGGGSKRTVAAPSVFIFPPSDEQLKSGTASV VCLLNNFYPREAKVQWKVDNALQSGNSQESVTEQDSKDSTY SLSSTLTLSKADYEKHKVYACEVTHQGLSSPVTKSFNRGEC |

### Table 33: Nucleic Acid Sequences Encoding Binding Domains (VH and VL) for Use in the Present Invention

[2563] SEQ ID NO:268 [Homo sapiens] REGN10989_VH .

CAGGTGCAGCTGGTGCAGTCTGGGGCTGAGGTGAAGAAGCCTGGGGCCTC
AGTGAAGGTCTCCTGCAAGGCTTCTGGATACATCTTCACCGGCTACTATA
TGCACTGGGTGCGACAGGCCCCTGGACAGGGGCTTGAGTGGATGGGATGG
ATCAACCCTAACAGTGGTGGCGCAAACTATGCACAGAAGTTTCAGGGCAG
GGTCACCCTGACCAGGGACACGTCCATCACCACAGTCTACATGGAACTGA
GCAGGCTGAGATTTGACGACACGGCCGTGTATTACTGTGCGAGAGGATCC
CGGTATGACTGGAACCAGAACAACTGGTTCGACCCCTGGGGCCAGGGAAC
CCTGGTCACCGTCTCCTCA

SEQ ID NO:269 [Homo sapiens] REGN10989_VL .

CAGTCTGCCCTGACTCAGCCTGCCTCCGTGTCTGGGTCTCCTGGACAGTC
GATCACCATCTCCTGCACTGGAACCAGCAGTGACGTTGGTACTTATAACT
ATGTCTCCTGGTACCAACAACACCCAGGCAAAGCCCCCAAACTCATGATT
TTTGATGTCAGTAATCGGCCCTCAGGGGTTTCTGATCGCTTCTCTGGCTC
CAAGTCTGGCAACACGGCCTCCCTGACCATCTCTGGGCTCCAGGCTGAGG
ACGAGGCTGATTATTACTGCAGCTCATTTACAACCAGCAGCACTGTGGTT
TTCGGCGGAGGGACCAAGCTGACCGTCCTA

SEQ ID NO:270 [Homo sapiens] RENG10987_VH .

CAGGTGCAGCTGGTGGAGTCTGGGGGAGGCGTGGTCCAGCCTGGGAGGTC
CCTGAGACTCTCCTGTGCAGCCTCTGGATTCACCTTCAGTAACTATGCTA
TGTACTGGGTCCGCCAGGCTCCAGGCAAGGGGCTGGAGTGGGTGGCAGTT
ATATCATATGATGGAAGTAATAAATACTATGCAGACTCCGTGAAGGGCCG
ATTCACCATCTCCAGAGACAATTCCAAGAACACGCTGTATCTGCAAATGA
ACAGCCTGAGAACTGAGGACACGGCTGTGTATTACTGTGCGAGTGGCTCC
GACTACGGTGACTACTTATTGGTTTACTGGGGCCAGGGAACCCTGGTCAC
CGTCTCCTCA

SEQ ID NO:271 [Homo sapiens] REGN10987_VL .

CAGTCTGCCCTGACTCAGCCTGCCTCCGTGTCTGGGTCTCCTGGACAGTC
GATCACCATCTCCTGCACTGGAACCAGCAGTGACGTTGGTGGTTATAACT
ATGTCTCCTGGTACCAACAACACCCAGGCAAAGCCCCCAAACTCATGATT
TATGATGTCAGTAAGCGGCCCTCAGGGGTTTCTAATCGCTTCTCTGGCTC
CAAGTCTGGCAACACGGCCTCCCTGACCATCTCTGGGCTCCAGTCTGAGG
ACGAGGCTGATTATTACTGCAACTCTTTGACAAGCATCAGCACTTGGGTG
TTCGGCGGAGGGACCAAGCTGACCGTCCTA

SEQ ID NO:272 [Homo sapiens] REGN10933_VH .

CAGGTGCAGCTGGTGGAGTCTGGGGGAGGCTTGGTCAAGCCTGGAGGGTC
CCTGAGACTCTCCTGTGCAGCCTCTGGATTCACCTTCAGTGACTACTACA
TGAGCTGGATCCGCCAGGCTCCAGGGAAGGGGCTGGAGTGGGTTTCATAC
ATTACTTATAGTGGTAGTACCATATACTACGCAGACTCTGTGAAGGGCCG
ATTCACCATCTCCAGGGACAACGCCAAGAGCTCACTGTATCTGCAAATGA
ACAGCCTGAGAGCCGAGGACACGGCCGTGTATTACTGTGCGAGAGATCGC
GGTACAACTATGGTCCCCTTTGACTACTGGGGCCAGGGAACCCTGGTCAC
CGTCTCCTCA

SEQ ID NO:273 [Homo sapiens] REGN10933_VK .

GACATCCAGATGACCCAGTCTCCATCCTCCCTGTCTGCATCTGTAGGAGA
CAGAGTCACCATCACTTGCCAGGCGAGTCAGGACATTACCAACTATTTAA
ATTGGTATCAGCAGAAACCAGGGAAAGCCCCTAAGCTCCTGATCTACGCT
GCATCCAATTTGGAAACAGGGGTCCCATCAAGGTTCAGTGGAAGTGGATC
TGGGACAGATTTTACTTTCACCATCAGCGGCCTGCAGCCTGAAGATATTG
CAACATATTACTGTCAACAGTATGATAATCTCCCTCTCACTTTCGGCGGA
GGGACCAAGGTGGAGATCAAA

SEQ ID NO:274 [Homo sapiens] REGN10934_VH .

GAGGTGCAGCTGGTGGAGTCTGGGGGAGGCTTGGTAAAGCCTGGGGGGTC
CCTTAGACTCTCCTGTGCAGCCTCTGGAATCACTTTCAGTAACGCCTGGA
TGAGTTGGGTCCGCCAGGCTCCAGGGAAGGGGCTGGAGTGGGTTGGCCGT
ATTAAAAGCAAAACTGATGGTGGGACAACAGACTACGCCGCACCCGTGAA
AGGCAGATTCACCATCTCAAGAGATGATTCAAAAAACACGCTGTATCTAC
AAATGAACAGCCTGAAAACCGAGGACACAGCCGTGTATTACTGTACCACA
GCGAGGTGGGACTGGTACTTCGATCTCTGGGGCCGTGGCACCCTGGTCAC
TGTCTCCTCA

SEQ ID NO:275 [Homo sapiens] REGN10934_VK .

GACATCCAGATGACCCAGTCTCCATCCTCCCTGTCTGCATCTGTAGGAGA
CAGAGTCACCATCACTTGCCAGGCGAGTCAGGACATTTGGAATTATATAA
ATTGGTATCAGCAGAAACCAGGGAAGGCCCCTAAGCTCCTGATCTACGAT
GCATCCAATTTGAAAACAGGGGTCCCATCAAGGTTCAGTGGAAGTGGATC
TGGGACAGATTTTACTTTCACCATCAGCAGCCTGCAGCCTGAAGATATTG
CAACATATTACTGTCAACAGCATGATGATCTCCCTCCGACCTTCGGCCAA
GGGACCAAGGTGGAAATCAAA

SEQ ID NO:276 [Homo sapiens] REGN10977_VH .

CAGGTGCAGCTGGTGCAGTCTGGGGCTGAGGTGAAGAAGCCTGGGTCCTC
GGTGAAGGTCTCCTGCAAGGCTTCTGGAGGCACCTTCAGCAGCTATGCTA
TCACCTGGGTGCGACAGGCCCCTGGACAAGGGCTTGAGTGGATGGGAAGG
ATCATCCCTATGTTTGGTATAGCAAACTACGCACAGAAGTTCCAGGGCAG
AGTCACGATTACCGCGGACAAATCCACGAGCACAGCCTACATGGAGGTGA
GCAGCCTGAGATCTGAGGACACGGCCGTGTATTACTGTGCGAGAACACCG
TTTTACTATGATAGTAGTGGTTATTACCTTGACTACTGGGGCCAGGGAAC
CCTGGTCACCGTCTCCTCA

SEQ ID NO:277 [Homo sapiens] REGN10977_VK .

GAAATTGTGTTGACGCAGTCTCCAGGCACCCTGTCTTTGTCTCCAGGGGA
AAGAGCCACCCTCTCTTGCAGGGCCAGTCAGAGTGTTAGCAGCAACTACT
TAGCCTGGTACCAGCAGAGTCCTGGCCAGGCTCCCAGGCTCCTCATCTAT
GGTGCATCCAGCAGGGCCACTGGCATCCCAGACAGGTTCAGTGGCAGTGG
GTCTGGGACAGACTTCACTCTCACCATCAGCAGACTGGAGCCTGAAGATT
TTGCAGTTTATTACTGTCAGCAGTATGTTAGGTCACCCCGGACGTTCGGC
CAAGGGACCAAGGTGGAAATCAAA

SEQ ID NO:278 [Homo sapiens] REGN10964_VH .

CAGGTGCAGCTGCAGGAGTCGGGCCCAGGACTGGTGAAGCCTTCGGAGAC
CCTGTCCCTCACCTGCACTGTCTCTGGTGGCTCCATCAATAATTACTACT
GGATCTGGATCCGGCAGCCCCCAGGGAAGGGACTGGAGTGGATTGGGTAT
ATCTATCACAGTGGGAGCACCAACTACAACCCCTCCCTCAAGAGTCGAGT
CACCATATCAGTAGACACGTCCAAGAACCAATTCTCCCTGAAGGTGAGCT
CTGTGACCGCTGCGGACACGGCCGTGTATTACTGTGCGAATATGGTTCGG
GGAGTTTATGAAGATGACTACTGGGGCCAGGGAACCCTGGTCACCGTCTC
CTCA

SEQ ID NO:279 [Homo sapiens] REGN10964_VK .

GACATCCAGATGACCCAGTCTCCATCCTCCCTGTCTGCATCTGTAGGAGA
CAGAGTCACCATCACTTGCCGGGCAAGTCAGAGCATTAGCAACTATTTAA
ATTGGTATCAGCAGAAACCAGGGAAAGCCCCTAAGCTCCTGATCTTTGCT
GCCTCCAGTTTGCGAAGTGGGGTCCCATCAAGGTTCAGTGGCAGTGGATC
TGGGACAGATTTCACTCTCACCATCAGCAGTCTGCACCCTGAAGATTTTG
CAACTTACTACTGTCAACAGAATTACAATACCCCCCTCACTTTCGGCCCT
GGGACCAAAGTGGATATCAAA

SEQ ID NO:280 [Homo sapiens] REGN10954_VH .

GAGGTGCAGCTGGTGGAGTCTGGGGGAGGCTTGGTCCAGCCTGGGGGGTC
ACTGAGACTCTCCTGTGCAGCCTCTGGAATCACCGTCAGTAGCAACTACA
TGAGCTGGGTCCGCCAGGCTCCAGGGAAGGGGCTGGAGTGGGTCTCACTT
ATTTATAGTGGTGGTAGCACATACTACGCAGACTCCGTGAAGGGCAGATT
CACCATCTCCAGAGACAATTCCAAGAACACGCTGTATCTTCAAATGAACA
GCCTGAGAGTCGAGGACACGGCTGTGTATTACTGTGCGAGAGATCACGGT
ATGGCAGCAGCGGGGTATAATTACTGGGGCCAGGGAACCCTGGTCACCGT
CTCCTCA

SEQ ID NO:281 [Homo sapiens] REGN10954_VK .

GACATCCAGATGACCCAGTCTCCATCCTCCCTGTCTGCGTCTGTAGGAGA
CAGAGTCACCATCACTTGCCAGGCGAGTCAGGACATTAACAAATATTTAA
ATTGGTATCAGCAGAAACCAGGGAAAGCCCCTAAGCTCCTGATCTACGAT
GCATCCAATTTGGAAACAGGGGTCCCATCAAGGTTCAGTGGAAGTGGATC
TGGGACAGATTTTACTTTCACCATCAACAGCCTGCAGCCTGAAGATTTTG
CAACATATTTCTGTCAACAGTATGATAATCTCCCTCCAGCGTTCGGCCAA
GGGACCAAGGTGGAAATCAAA

SEQ ID NO:282 [Homo sapiens] REGN10984_VH .

GAGGTGCAGCTGGTGGAGTCTGGGGGAGGCTTGGTCCAGCCTGGGGGGTC
CCTGAGACTCTCCTGTGCAGCCTCTGGACTCACCGTCAATCGCAACTACA
TGAGCTGGGTCCGCCAGGCTCCAGGGAAGGGGCTGGAGTGGGTCTCACTT
ATTTATAGCGGTGGTAGCACATACTACGCAGACTCCGTTAAGGGCCGATT
CACCATCTCCAGAGACAATTCCAAGAACACGCTGTATCTTCAAATGAACA
GCCTGAGACTTGAGGACACGGCTGTGTATTACTGTGCGAGAGGTGAACTG
GGGATCCCCTACGGTATGGACGTCTGGGGCCAAGGGACCACGGTCACCGT
CTCCTCA

SEQ ID NO:283 [Homo sapiens] REGN10984_VL .

CAGTCTGTGTTGACGCAGCCGCCCTCAGTGTCTGCGGCCCCAGGACAGAA
GGTCACCATCTCCTGCTCTGGAAGCAGCTCCAACATTGGGAATAATTATG
TATCCTGGTACCAGCAGCTCCCAGGAACAGCCCCCAAACTCCTCATTTAT
GACAATAATAAGCGACCCTCAGGGATTCCTGACCGCTTCTCTGGCTCCAA
GTCTGGCACGTCAGCCACCCTGGGCATCACCGGACTCCAGACTGGGGACG
AGGCCGATTATTACTGCGGAACATGGGATAGCAGCCTGAGTGCTGGGGTG
TTCGGCGGAGGGACCAAGCTGACCGTCCTA

SEQ ID NO:284 [Homo sapiens] REGN10986_VH .

GAGGTGCAGCTGGTGGAGTCTGGGGGAGGCTTGGTCCAGCCTGGGGGGTC
CCTGAGACTCTCCTGTGCAGCCTCTGAATTCACCGTCAGTAGCAACTACA
TGAGCTGGGTCCGCCAGGCTCCAGGGAAGGGGCTAGAGTGGGTCTCAGTT
ATTTATAGCGGTGGTAGCACATTTTACGCAGACTCCGTGAAGGGCAGATT
CACCATCTCCAGAGACAATTCCAAGAACACGTTGTATCTTCAAATGAACA
GTCTGAGAGCCGAGGACACGGCTGTATATTACTGTGCGAGAGCTCTTCCC
TACGGTGACTTGCATTTTGACTACTGGGGCCAGGGAACCCTGGTCACCGT
CTCCTCA

SEQ ID NO:285 [Homo sapiens] REGN10986_VL .

CAGTCTGTGCTGACGCAGCCGCCCTCAGTGTCTGGGGCCCCAGGGCAGAG
GGTCACCATCTCCTGCACTGGGAGCAGCTCCAACATCGGGACAGGTTATG
ATGTACACTGGTACCAGCAGCTTCCAGGAACAGCCCCCAAACTCCTCATC
TATGGTAACACCAATCGGCCCTCAGGGGTCCCTGACCGATTCTCTGGCTC
CAAGTCTGGCACCTCAGCCTCCCTGGCCATCACTGGGCTCCAGGCTGAGG
ATGAGGCTGATTATTACTGCCAGTCCTATGACAGCAGCCTGAGTGACTCT
TATGTCTTCGGAACTGGGACCAAGGTCACCGTCCTA

TABLE 34

Amino acid sequences of a binding domain (Nb-112, SEQ ID NO: 288) and polypeptides (SEQ ID NOs: 289 & 290) for use in the present invention

| SEQ ID No: | Quad Name | AMINO ACID SEQUENCE |
|---|---|---|
| 288 | Q231 | DVQLQESGGGLVQPGGSLRLSCAASGLTLDYYAIGWFRQA PGKEREGVSCISSSDGSTYYADSVKGRFTTSRDNAKNTVY LQMNSLKPEDTAVYYCAAVPSTYYSGTYYYTCHPGGMDYW GKGTQVTVSS |
| 289 | Q232 | DVQLQESGGGLVQPGGSLRLSCAASGLTLDYYAIGWFRQA PGKEREGVSCISSSDGSTYYADSVKGRFTTSRDNAKNTVY LQMNSLKPEDTAVYYCAAVPSTYYSGTYYYTCHPGGMDYW GKGTQVTVSSGGGGSGGGGSKKKPLDGEYFTLQIRGRERF EMFRELNEALELKDAQAGKEPG |
| 290 | Q233 | DVQLQESGGGLVQPGGSLRLSCAASGLTLDYYAIGWFRQA PGKEREGVSCISSSDGSTYYADSVKGRFTTSRDNAKNTVY LQMNSLKPEDTAVYYCAAVPSTYYSGTYYYTCHPGGMDYW GKGTQVTVSSGGSGGSDVQLQESGGGLVQPGGSLRLSCAA SGLTLDYYAIGWFRQAPGKEREGVSCISSSDGSTYYADSV KGRFTTSRDNAKNTVYLQMNSLKPEDTAVYYCAAVPSTYY SGTYYYTCHPGGMDYWGKGTQVTVSSGGGGSGGGGSKKKP LDGEYFTLQIRGRERFEMFRELNEALELKDAQAGKEPG |

TABLE 35

Amino acid sequences of Nb-112 based Quad polypeptides with an intact hinge region

| SEQ ID No: | Quad Name | AMINO ACID SEQUENCE |
|---|---|---|
| 291 | Q246 | DVQLQESGGGLVQPGGSLRLSCAASGLTLDYYAIGWFRQA PGKEREGVSCISSSDGSTYYADSVKGRFTTSRDNAKNTVY LQMNSLKPEDTAVYYCAAVPSTYYSGTYYYTCHPGGMDYW GKGTQVTVSSGGGGSGGGGSEPKSCDKTHTCPPCPAPELL GGKKKPLDGEYFTLQIRGRERFEMFRELNEALELKDAQAG KEPG |
| 292 | Q247 | DVQLQESGGGLVQPGGSLRLSCAASGLTLDYYAIGWFRQA PGKEREGVSCISSSDGSTYYADSVKGRFTTSRDNAKNTVY LQMNSLKPEDTAVYYCAAVPSTYYSGTYYYTCHPGGMDYW GKGTQVTVSSGGSGGSDVQLQESGGGLVQPGGSLRLSCAA SGLTLDYYAIGWFRQAPGKEREGVSCISSSDGSTYYADSV KGRFTTSRDNAKNTVYLQMNSLKPEDTAVYYCAAVPSTYY SGTYYYTCHPGGMDYWGKGTQVTVSSGGGGSGGGGSEPKS CDKTHTCPPCPAPELLGGKKKPLDGEYFTLQIRGRERFEM FRELNEALELKDAQAGKEPG |

### Table 36: Antibody Single Variable Domains

[2564] (a) The amino acid sequence of an anti-hRSV protein F nanobody for use as a binding domain in the present invention); there is provided a polypeptide or multimer as described herein comprising at least 4 copies of the nanobody (eg, for administration to a human or animal subject for treating or preventing RSV infection or a symptom thereof in the subject; also provided is a composition as described herein which comprises the multimer). SEQ ID NO: 293

EVQLVESGGGLVQAGGSLSISCAASGGSLSNYVLGWFRQAPGKEREFVAA
INWRGDITIGPPNVEGRFTISRDNAKNTGYLQMNSLAPDDTAVYYCGAGT
PLNPGAYIYDWSYDYWGRGTQVTVSS

[2565] (b) An antibody single variable domain (binding domain) herein may comprise a HCDR3 that comprises SEQ ID NO: 294 (which is the HCDR3 sequence of Nb1 1-59); there is provided a polypeptide or multimer as described herein comprising at least 4 copies of the domain (eg, for administration to a human or animal subject for treating or preventing SARS-CoV-2 infection or a symptom thereof in the subject; also provided is a composition as described herein which comprises the multimer). SEQ ID NO: 294

APSQTYGGSWYWDPIGD

TABLE 37

Exemplary Inhalable Compositions

| | | | |
|---|---|---|---|
| | Composition 1 (1 mg/ml of Quad) | Composition 2 (0.25 mg/ml of Quad) | Composition 3 (0.5 mg/ml of Quad) |
| Particle Size (µm) | 2.90 - 3.23 | 3.07 - 3.42 | 3.45 - 3.79 |
| Respirable Component | 67.66 - 73.50 | 71.78 - 76.69 | 62.32 - 66.90 |
| (0.5 - 5.0 µm) | | | |
| (% of composition) | | | |
| Coarse particles | 27.00 - 31.11 | 23.62 - 28.21 | 32.31 - 36.12 |
| (>4.7 µm) | | | |
| % of composition) | | | |
| Fine particles | 66.33 - 72.07 | 68.58 - 73.84 | 59.36 - 64.17 |
| (<4.7 µm) | | | |
| % of composition) | | | |
| Ultra-fiine Particles | 5.91 - 9.93 | 1.85 - 4.19 | 2.36 - 4.51 |
| (<1.0 m) | | | |
| (% of cocomposition) | | | |

The application's sequence listing, which the Patent Office published only in electronic form, follows.

SEQUENCE LISTING (509 sequences)

SEQ ID NO: 1 - protein, 393 aa, Homo sapiens [sequence omitted]

SEQ ID NO: 2 - protein, 341 aa, Homo sapiens
MEEPQSDPSVEPPLSQETFSDLWKLLPENNVLSPLPSQAMDDLMLSPDDIEQWFTEDPGPDEAPRMPEAAPPVAPAPAAPTPAAPAPAPSWPLSSSVPSQKTYQGSYGFRLGFLHSGTAKSVTCTYSPALNKMFCQLAKTCPVQLWVDSTPPPGTRVRAMAIYKQSQHMTEVVRRCPHHERCSDSDGLAPPQHLIRVEGNLRVEYLDDRNTFRHSVVVPYEPPEVGSDCTTIHYNYMCNSSCMGGMNRRPILTIITLEDSSGNLLGRNSFEVRVCACPGRDRRTEEENLRKKGEPHHELPPGSTKRALPNNTSSSPQPKKKPLDGEYFTLQDQTSFQKENC

SEQ ID NO: 3 - protein, 346 aa, Homo sapiens
MEEPQSDPSVEPPLSQETFSDLWKLLPENNVLSPLPSQAMDDLMLSPDDIEQWFTEDPGPDEAPRMPEAAPPVAPAPAAPTPAAPAPAPSWPLSSSVPSQKTYQGSYGFRLGFLHSGTAKSVTCTYSPALNKMFCQLAKTCPVQLWVDSTPPPGTRVRAMAIYKQSQHMTEVVRRCPHHERCSDSDGLAPPQHLIRVEGNLRVEYLDDRNTFRHSVVVPYEPPEVGSDCTTIHYNYMCNSSCMGGMNRRPILTIITLEDSSGNLLGRNSFEVRVCACPGRDRRTEEENLRKKGEPHHELPPGSTKRALPNNTSSSPQPKKKPLDGEYFTLQMLLDLRWCYFLINSS

SEQ ID NO: 4 - protein, 354 aa, Homo sapiens
MDDLMLSPDDIEQWFTEDPGPDEAPRMPEAAPPVAPAPAAPTPAAPAPAPSWPLSSSVPSQKTYQGSYGFRLGFLHSGTAKSVTCTYSPALNKMFCQLAKTCPVQLWVDSTPPPGTRVRAMAIYKQSQHMTEVVRRCPHHERCSDSDGLAPPQHLIRVEGNLRVEYLDDRNTFRHSVVVPYEPPEVGSDCTTIHYNYMCNSSCMGGMNRRPILTIITLEDSSGNLLGRNSFEVRVCACPGRDRRTEEENLRKKGEPHHELPPGSTKRALPNNTSSSPQPKKKPLDGEYFTLQIRGRERFEMFRELNEALELKDAQAGKEPGGSRAHSSHLKSKKGQSTSRHKKLMFKTEGPDSD

SEQ ID NO: 5 - protein, 302 aa, Homo sapiens
MDDLMLSPDDIEQWFTEDPGPDEAPRMPEAAPPVAPAPAAPTPAAPAPAPSWPLSSSVPSQKTYQGSYGFRLGFLHSGTAKSVTCTYSPALNKMFCQLAKTCPVQLWVDSTPPPGTRVRAMAIYKQSQHMTEVVRRCPHHERCSDSDGLAPPQHLIRVEGNLRVEYLDDRNTFRHSVVVPYEPPEVGSDCTTIHYNYMCNSSCMGGMNRRPILTIITLEDSSGNLLGRNSFEVRVCACPGRDRRTEEENLRKKGEPHHELPPGSTKRALPNNTSSSPQPKKKPLDGEYFTLQDQTSFQKENC

SEQ ID NO: 6 - protein, 307 aa, Homo sapiens
MDDLMLSPDDIEQWFTEDPGPDEAPRMPEAAPPVAPAPAAPTPAAPAPAPSWPLSSSVPSQKTYQGSYGFRLGFLHSGTAKSVTCTYSPALNKMFCQLAKTCPVQLWVDSTPPPGTRVRAMAIYKQSQHMTEVVRRCPHHERCSDSDGLAPPQHLIRVEGNLRVEYLDDRNTFRHSVVVPYEPPEVGSDCTTIHYNYMCNSSCMGGMNRRPILTIITLEDSSGNLLGRNSFEVRVCACPGRDRRTEEENLRKKGEPHHELPPGSTKRALPNNTSSSPQPKKKPLDGEYFTLQMLLDLRWCYFLINSS

SEQ ID NO: 7 - protein, 261 aa, Homo sapiens
MFCQLAKTCPVQLWVDSTPPPGTRVRAMAIYKQSQHMTEVVRRCPHHERCSDSDGLAPPQHLIRVEGNLRVEYLDDRNTFRHSVVVPYEPPEVGSDCTTIHYNYMCNSSCMGGMNRRPILTIITLEDSSGNLLGRNSFEVRVCACPGRDRRTEEENLRKKGEPHHELPPGSTKRALPNNTSSSPQPKKKPLDGEYFTLQIRGRERFEMFRELNEALELKDAQAGKEPGGSRAHSSHLKSKKGQSTSRHKKLMFKTEGPDSD

SEQ ID NO: 8 - protein, 261 aa, Homo sapiens; identical to SEQ ID NO: 7

SEQ ID NO: 9 - protein, 214 aa, Homo sapiens
MFCQLAKTCPVQLWVDSTPPPGTRVRAMAIYKQSQHMTEVVRRCPHHERCSDSDGLAPPQHLIRVEGNLRVEYLDDRNTFRHSVVVPYEPPEVGSDCTTIHYNYMCNSSCMGGMNRRPILTIITLEDSSGNLLGRNSFEVRVCACPGRDRRTEEENLRKKGEPHHELPPGSTKRALPNNTSSSPQPKKKPLDGEYFTLQMLLDLRWCYFLINSS

SEQ ID NO: 10 - protein, 32 aa, Homo sapiens
GEYFTLQIRGRERFEMFRELNEALELKDAQAG

SEQ ID NO: 11 - protein, 50 aa, Homo sapiens
RSPDDELLYLPVRGRETYEMLLKIKESLELMQYLPQHTIETYRQQQQQQH

SEQ ID NO: 12 - protein, 42 aa, Homo sapiens
KKRRHGDEDTYYLQVRGRENFEILMKLKESLELMELVPQPLV

SEQ ID NO: 13 - DNA, 1248 bp, Artificial Sequence
  Synthetic
atgagcctcgggctcctgtgctgtggggccttttctctcctgtgggcaggtccagtgaatgccggtgtcactcagaccccaaaattccaggtcctgaagacaggacagagcatgacactgcagtgtgcccaggatatgaaccatgaatacatgtcctggtatcgacaagacccaggcatggggctgaggctgattcattactcagttgccatccagacaactgaccaaggagaagtccccaatggctacaatgtctccagatcaaccatcgaggatttcccgctcaggctgctgtcggctgctccctcccagacatctgtgtacttctgtgccagcagttacctggggaacaccggggagctgttttttggagaaggctctaggctgaccgtactggaggacctgaaaaacgtgttcccacccgaggtcgctgtgtttgagccatcagaagcagagatctcccacacccaaaaggccacactggtgtgcctggccacaggcttctaccccgaccatgtggagctgagctggtgggtgaatgggaaggaggtgcacagtggggtcagcacagacccgcagcccctcaaggagcagcccgccctcaatgactccagatacgctctgagcagccgcctgagggtctcggccaccttctggcaggacccccgcaaccacttccgctgtcaagtccagttctacgggctctcggagaatgacgagtggacccaggatagggccaaacccgtcacccagatcgtcagcgccgaggcctggggtagagcagacgccagcaccaagggcccctctgtgttccctctggccccttccagcaagtccacctctggcggaacagccgctctgggctgcctcgtgaaggactacttccccgagcctgtgaccgtgtcctggaactctggcgctctgaccagcggagtgcacaccttccctgctgtgctgcagtcctccggcctgtactccctgtcctccgtcgtgaccgtgccttccagctctctgggcacccagacctacatctgcaacgtgaaccacaagccctccaacaccaaggtggacaagaaggtgctaacagacagagaatgggcagaagagtggaaacatcttgaccatctgttaaactgcataatggacatggtagaaaaaacaaggcgatctctcaccgtactaaggcggtgtcaagaagcagaccgggaagaattgaattactggatccggcggtacagtgacgccgag

SEQ ID NO: 14 - DNA, 1263 bp, Artificial Sequence
  Synthetic
atgagcctcgggctcctgtgctgtggggccttttctctcctgtgggcaggtccagtgaatgccggtgtcactcagaccccaaaattccaggtcctgaagacaggacagagcatgacactgcagtgtgcccaggatatgaaccatgaatacatgtcctggtatcgacaagacccaggcatggggctgaggctgattcattactcagttgccatccagacaactgaccaaggagaagtccccaatggctacaatgtctccagatcaaccatcgaggatttcccgctcaggctgctgtcggctgctccctcccagacatctgtgtacttctgtgccagcagttacctggggaacaccggggagctgttttttggagaaggctctaggctgaccgtactggaggacctgaaaaacgtgttcccacccgaggtcgctgtgtttgagccatcagaagcagagatctcccacacccaaaaggccacactggtgtgcctggccacaggcttctaccccgaccatgtggagctgagctggtgggtgaatgggaaggaggtgcacagtggggtcagcacagacccgcagcccctcaaggagcagcccgccctcaatgactccagatacgctctgagcagccgcctgagggtctcggccaccttctggcaggacccccgcaaccacttccgctgtcaagtccagttctacgggctctcggagaatgacgagtggacccaggatagggccaaacccgtcacccagatcgtcagcgccgaggcctggggtagagcagacgccagcaccaagggcccctctgtgttccctctggccccttccagcaagtccacctctggcggaacagccgctctgggctgcctcgtgaaggactacttccccgagcctgtgaccgtgtcctggaactctggcgctctgaccagcggagtgcacaccttccctgctgtgctgcagtcctccggcctgtactccctgtcctccgtcgtgaccgtgccttccagctctctgggcacccagacctacatctgcaacgtgaaccacaagccctccaacaccaaggtggacaagaaggtgggaggaggtgggagcctaacagacagagaatgggcagaagagtggaaacatcttgaccatctgttaaactgcataatggacatggtagaaaaaacaaggcgatctctcaccgtactaaggcggtgtcaagaagcagaccgggaagaattgaattactggatccggcggtacagtgacgccgag

SEQ ID NO: 15 - DNA, 1248 bp, Artificial Sequence
  Synthetic
atgagcctcgggctcctgtgctgtggggccttttctctcctgtgggcaggtccagtgaatgccggtgtcactcagaccccaaaattccaggtcctgaagacaggacagagcatgacactgcagtgtgcccaggatatgaaccatgaatacatgtcctggtatcgacaagacccaggcatggggctgaggctgattcattactcagttgccatccagacaactgaccaaggagaagtccccaatggctacaatgtctccagatcaaccatcgaggatttcccgctcaggctgctgtcggctgctccctcccagacatctgtgtacttctgtgccagcagttacctggggaacaccggggagctgttttttggagaaggctctaggctgaccgtactggaggacctgaaaaacgtgttcccacccgaggtcgctgtgtttgagccatcagaagcagagatctcccacacccaaaaggccacactggtgtgcctggccacaggcttctaccccgaccatgtggagctgagctggtgggtgaatgggaaggaggtgcacagtggggtctgcacagacccgcagcccctcaaggagcagcccgccctcaatgactccagatacgctctgagcagccgcctgagggtctcggccaccttctggcaggacccccgcaaccacttccgctgtcaagtccagttctacgggctctcggagaatgacgagtggacccaggatagggccaaacccgtcacccagatcgtcagcgccgaggcctggggtagagcagacgccagcaccaagggcccctctgtgttccctctggccccttccagcaagtccacctctggcggaacagccgctctgggctgcctcgtgaaggactacttccccgagcctgtgaccgtgtcctggaactctggcgctctgaccagcggagtgcacaccttccctgctgtgctgcagtcctccggcctgtactccctgtcctccgtcgtgaccgtgccttccagctctctgggcacccagacctacatctgcaacgtgaaccacaagccctccaacaccaaggtggacaagaaggtgctaacagacagagaatgggcagaagagtggaaacatcttgaccatctgttaaactgcataatggacatggtagaaaaaacaaggcgatctctcaccgtactaaggcggtgtcaagaagcagaccgggaagaattgaattactggatccggcggtacagtgacgccgag

SEQ ID NO: 16 - DNA, 1263 bp, Artificial Sequence
  Synthetic
atgagcctcgggctcctgtgctgtggggccttttctctcctgtgggcaggtccagtgaatgccggtgtcactcagaccccaaaattccaggtcctgaagacaggacagagcatgacactgcagtgtgcccaggatatgaaccatgaatacatgtcctggtatcgacaagacccaggcatggggctgaggctgattcattactcagttgccatccagacaactgaccaaggagaagtccccaatggctacaatgtctccagatcaaccatcgaggatttcccgctcaggctgctgtcggctgctccctcccagacatctgtgtacttctgtgccagcagttacctggggaacaccggggagctgttttttggagaaggctctaggctgaccgtactggaggacctgaaaaacgtgttcccacccgaggtcgctgtgtttgagccatcagaagcagagatctcccacacccaaaaggccacactggtgtgcctggccacaggcttctaccccgaccatgtggagctgagctggtgggtgaatgggaaggaggtgcacagtggggtctgcacagacccgcagcccctcaaggagcagcccgccctcaatgactccagatacgctctgagcagccgcctgagggtctcggccaccttctggcaggacccccgcaaccacttccgctgtcaagtccagttctacgggctctcggagaatgacgagtggacccaggatagggccaaacccgtcacccagatcgtcagcgccgaggcctggggtagagcagacgccagcaccaagggcccctctgtgttccctctggccccttccagcaagtccacctctggcggaacagccgctctgggctgcctcgtgaaggactacttccccgagcctgtgaccgtgtcctggaactctggcgctctgaccagcggagtgcacaccttccctgctgtgctgcagtcctccggcctgtactccctgtcctccgtcgtgaccgtgccttccagctctctgggcacccagacctacatctgcaacgtgaaccacaagccctccaacaccaaggtggacaagaaggtgggaggaggtgggagcctaacagacagagaatgggcagaagagtggaaacatcttgaccatctgttaaactgcataatggacatggtagaaaaaacaaggcgatctctcaccgtactaaggcggtgtcaagaagcagaccgggaagaattgaattactggatccggcggtacagtgacgccgag

SEQ ID NO: 17 - DNA, 954 bp, Artificial Sequence
  Synthetic
atgagcctcgggctcctgtgctgtggggccttttctctcctgtgggcaggtccagtgaatgccggtgtcactcagaccccaaaattccaggtcctgaagacaggacagagcatgacactgcagtgtgcccaggatatgaaccatgaatacatgtcctggtatcgacaagacccaggcatggggctgaggctgattcattactcagttgccatccagacaactgaccaaggagaagtccccaatggctacaatgtctccagatcaaccatcgaggatttcccgctcaggctgctgtcggctgctccctcccagacatctgtgtacttctgtgccagcagttacctggggaacaccggggagctgttttttggagaaggctctaggctgaccgtactggaggacctgaaaaacgtgttcccacccgaggtcgctgtgtttgagccatcagaagcagagatctcccacacccaaaaggccacactggtgtgcctggccacaggcttctaccccgaccatgtggagctgagctggtgggtgaatgggaaggaggtgcacagtggggtctgcacagacccgcagcccctcaaggagcagcccgccctcaatgactccagatacgctctgagcagccgcctgagggtctcggccaccttctggcaggacccccgcaaccacttccgctgtcaagtccagttctacgggctctcggagaatgacgagtggacccaggatagggccaaacccgtcacccagatcgtcagcgccgaggcctggggtagagcagacctaacagacagagaatgggcagaagagtggaaacatcttgaccatctgttaaactgcataatggacatggtagaaaaaacaaggcgatctctcaccgtactaaggcggtgtcaagaagcagaccgggaagaattgaattactggatccggcggtacagtgacgccgag

SEQ ID NO: 18 - DNA, 969 bp, Artificial Sequence
  Synthetic
atgagcctcgggctcctgtgctgtggggccttttctctcctgtgggcaggtccagtgaatgccggtgtcactcagaccccaaaattccaggtcctgaagacaggacagagcatgacactgcagtgtgcccaggatatgaaccatgaatacatgtcctggtatcgacaagacccaggcatggggctgaggctgattcattactcagttgccatccagacaactgaccaaggagaagtccccaatggctacaatgtctccagatcaaccatcgaggatttcccgctcaggctgctgtcggctgctccctcccagacatctgtgtacttctgtgccagcagttacctggggaacaccggggagctgttttttggagaaggctctaggctgaccgtactggaggacctgaaaaacgtgttcccacccgaggtcgctgtgtttgagccatcagaagcagagatctcccacacccaaaaggccacactggtgtgcctggccacaggcttctaccccgaccatgtggagctgagctggtgggtgaatgggaaggaggtgcacagtggggtctgcacagacccgcagcccctcaaggagcagcccgccctcaatgactccagatacgctctgagcagccgcctgagggtctcggccaccttctggcaggacccccgcaaccacttccgctgtcaagtccagttctacgggctctcggagaatgacgagtggacccaggatagggccaaacccgtcacccagatcgtcagcgccgaggcctggggtagagcagacggaggaggtgggagcctaacagacagagaatgggcagaagagtggaaacatcttgaccatctgttaaactgcataatggacatggtagaaaaaacaaggcgatctctcaccgtactaaggcggtgtcaagaagcagaccgggaagaattgaattactggatccggcggtacagtgacgccgag

SEQ ID NO: 19 - DNA, 999 bp, Artificial Sequence
  Synthetic
atggagaccctcttgggcctgcttatcctttggctgcagctgcaatgggtgagcagcaaacaggaggtgacacagattcctgcagctctgagtgtcccagaaggagaaaacttggttctcaactgcagtttcactgatagcgctatttacaacctccagtggtttaggcaggaccctgggaaaggtctcacatctctgttgcttattacaccttggcagagagagcaaacaagtggaagacttaatgcctcgctggataaatcatcaggacgtagtactttatacattgcagcttctcagcctggtgactcagccacctacctctgtgctgtgaggcccctgcttgacggaacatacatacctacatttggaagaggaaccagccttattgttcatccgtatatccagaaccctgaccctgccgtgtaccagctgagagactctaaatccagtgacaagtctgtctgcctattcaccgattttgattctcaaacaaatgtgtcacaaagtaaggattctgatgtgtatatcacagacaaaactgtgctagacatgaggtctatggacttcaagagcaacagtgctgtggcctggagcaacaaatctgactttgcatgtgcaaacgccttcaacaacagcattattccagaagacaccttcttccccagcccagaaagttccacggtggccgctccctccgtgttcatcttcccaccttccgacgagcagctgaagtccggcaccgcttctgtcgtgtgcctgctgaacaacttctacccccgcgaggccaaggtgcagtggaaggtggacaacgccctgcagtccggcaactcccaggaatccgtgaccgagcaggactccaaggacagcacctactccctgtcctccaccctgaccctgtccaaggccgactacgagaagcacaaggtgtacgcctgcgaagtgacccaccagggcctgtctagccccgtgaccaagtctttcaaccggggcgagtgt

SEQ ID NO: 20 - DNA, 999 bp, Artificial Sequence
  Synthetic
atggagaccctcttgggcctgcttatcctttggctgcagctgcaatgggtgagcagcaaacaggaggtgacacagattcctgcagctctgagtgtcccagaaggagaaaacttggttctcaactgcagtttcactgatagcgctatttacaacctccagtggtttaggcaggaccctgggaaaggtctcacatctctgttgcttattacaccttggcagagagagcaaacaagtggaagacttaatgcctcgctggataaatcatcaggacgtagtactttatacattgcagcttctcagcctggtgactcagccacctacctctgtgctgtgaggcccctgcttgacggaacatacatacctacatttggaagaggaaccagccttattgttcatccgtatatccagaaccctgaccctgccgtgtaccagctgagagactctaaatccagtgacaagtctgtctgcctattcaccgattttgattctcaaacaaatgtgtcacaaagtaaggattctgatgtgtatatcacagacaaatgtgtgctagacatgaggtctatggacttcaagagcaacagtgctgtggcctggagcaacaaatctgactttgcatgtgcaaacgccttcaacaacagcattattccagaagacaccttcttccccagcccagaaagttccacggtggccgctccctccgtgttcatcttcccaccttccgacgagcagctgaagtccggcaccgcttctgtcgtgtgcctgctgaacaacttctacccccgcgaggccaaggtgcagtggaaggtggacaacgccctgcagtccggcaactcccaggaatccgtgaccgagcaggactccaaggacagcacctactccctgtcctccaccctgaccctgtccaaggccgactacgagaagcacaaggtgtacgcctgcgaagtgacccaccagggcctgtctagccccgtgaccaagtctttcaaccggggcgagtgt

SEQ ID NO: 21 - DNA, 681 bp, Artificial Sequence
  Synthetic
atggagaccctcttgggcctgcttatcctttggctgcagctgcaatgggtgagcagcaaacaggaggtgacacagattcctgcagctctgagtgtcccagaaggagaaaacttggttctcaactgcagtttcactgatagcgctatttacaacctccagtggtttaggcaggaccctgggaaaggtctcacatctctgttgcttattacaccttggcagagagagcaaacaagtggaagacttaatgcctcgctggataaatcatcaggacgtagtactttatacattgcagcttctcagcctggtgactcagccacctacctctgtgctgtgaggcccctgcttgacggaacatacatacctacatttggaagaggaaccagccttattgttcatccgtatatccagaaccctgaccctgccgtgtaccagctgagagactctaaatccagtgacaagtctgtctgcctattcaccgattttgattctcaaacaaatgtgtcacaaagtaaggattctgatgtgtatatcacagacaaatgtgtgctagacatgaggtctatggacttcaagagcaacagtgctgtggcctggagcaacaaatctgactttgcatgtgcaaacgccttcaacaacagcattattccagaagacaccttcttccccagcccagaaagttcc

SEQ ID NO: 22 - DNA, 1647 bp, Artificial Sequence
  Synthetic
atgagcctcgggctcctgtgctgtggggccttttctctcctgtgggcaggtccagtgaatgccggtgtcactcagaccccaaaattccaggtcctgaagacaggacagagcatgacactgcagtgtgcccaggatatgaaccatgaatacatgtcctggtatcgacaagacccaggcatggggctgaggctgattcattactcagttgccatccagacaactgaccaaggagaagtccccaatggctacaatgtctccagatcaaccatcgaggatttcccgctcaggctgctgtcggctgctccctcccagacatctgtgtacttctgtgccagcagttacctggggaacaccggggagctgttttttggagaaggctctaggctgaccgtactggaggacctgaaaaacgtgttcccacccgaggtcgctgtgtttgagccatcagaagcagagatctcccacacccaaaaggccacactggtgtgcctggccacaggcttctaccccgaccatgtggagctgagctggtgggtgaatgggaaggaggtgcacagtggggtcagcacagacccgcagcccctcaaggagcagcccgccctcaatgactccagatacgctctgagcagccgcctgagggtctcggccaccttctggcaggacccccgcaaccacttccgctgtcaagtccagttctacgggctctcggagaatgacgagtggacccaggatagggccaaacccgtcacccagatcgtcagcgccgaggcctggggtagagcagacgccagcaccaagggcccctctgtgttccctctggccccttccagcaagtccacctctggcggaacagccgctctgggctgcctcgtgaaggactacttccccgagcctgtgaccgtgtcctggaactctggcgctctgaccagcggagtgcacaccttccctgctgtgctgcagtcctccggcctgtactccctgtcctccgtcgtgaccgtgccttccagctctctgggcacccagacctacatctgcaacgtgaaccacaagccctccaacaccaaggtggacaagaaggtgctaacagacagagaatgggcagaagagtggaaacatcttgaccatctgttaaactgcataatggacatggtagaaaaaacaaggcgatctctcaccgtactaaggcggtgtcaagaagcagaccgggaagaattgaattactggatccggcggtacagtgacgccgaggcacctacttcaagttctacaaagaaaacacagctacaactggagcatttactgctggatttacagatgattttgaatggaattaataattacaagaatcccaaactcaccaggatgctcacatttaagttttacatgcccaagaaggccacagaactgaaacatcttcagtgtctagaagaagaactcaaacctctggaggaagtgctaaatttagctcaaagcaaaaactttcacttaagacccagggacttaatcagcaatatcaacgtaatagttctggaactaaagggatctgaaacaacattcatgtgtgaatatgctgatgagacagcaaccattgtagaatttctgaacagatggattaccttttgtcaaagcatcatctcaacactgact

SEQ ID NO: 23 - DNA, 1662 bp, Artificial Sequence
  Synthetic
atgagcctcgggctcctgtgctgtggggccttttctctcctgtgggcaggtccagtgaatgccggtgtcactcagaccccaaaattccaggtcctgaagacaggacagagcatgacactgcagtgtgcccaggatatgaaccatgaatacatgtcctggtatcgacaagacccaggcatggggctgaggctgattcattactcagttgccatccagacaactgaccaaggagaagtccccaatggctacaatgtctccagatcaaccatcgaggatttcccgctcaggctgctgtcggctgctccctcccagacatctgtgtacttctgtgccagcagttacctggggaacaccggggagctgttttttggagaaggctctaggctgaccgtactggaggacctgaaaaacgtgttcccacccgaggtcgctgtgtttgagccatcagaagcagagatctcccacacccaaaaggccacactggtgtgcctggccacaggcttctaccccgaccatgtggagctgagctggtgggtgaatgggaaggaggtgcacagtggggtcagcacagacccgcagcccctcaaggagcagcccgccctcaatgactccagatacgctctgagcagccgcctgagggtctcggccaccttctggcaggacccccgcaaccacttccgctgtcaagtccagttctacgggctctcggagaatgacgagtggacccaggatagggccaaacccgtcacccagatcgtcagcgccgaggcctggggtagagcagacgccagcaccaagggcccctctgtgttccctctggccccttccagcaagtccacctctggcggaacagccgctctgggctgcctcgtgaaggactacttccccgagcctgtgaccgtgtcctggaactctggcgctctgaccagcggagtgcacaccttccctgctgtgctgcagtcctccggcctgtactccctgtcctccgtcgtgaccgtgccttccagctctctgggcacccagacctacatctgcaacgtgaaccacaagccctccaacaccaaggtggacaagaaggtgggaggaggtgggagcctaacagacagagaatgggcagaagagtggaaacatcttgaccatctgttaaactgcataatggacatggtagaaaaaacaaggcgatctctcaccgtactaaggcggtgtcaagaagcagaccgggaagaattgaattactggatccggcggtacagtgacgccgaggcacctacttcaagttctacaaagaaaacacagctacaactggagcatttactgctggatttacagatgattttgaatggaattaataattacaagaatcccaaactcaccaggatgctcacatttaagttttacatgcccaagaaggccacagaactgaaacatcttcagtgtctagaagaagaactcaaacctctggaggaagtgctaaatttagctcaaagcaaaaactttcacttaagacccagggacttaatcagcaatatcaacgtaatagttctggaactaaagggatctgaaacaacattcatgtgtgaatatgctgatgagacagcaaccattgtagaatttctgaacagatggattaccttttgtcaaagcatcatctcaacactgact

SEQ ID NO: 24 - DNA, 1293 bp, Artificial Sequence
  Synthetic
atgagcctcgggctcctgtgctgtggggccttttctctcctgtgggcaggtccagtgaatgccggtgtcactcagaccccaaaattccaggtcctgaagacaggacagagcatgacactgcagtgtgcccaggatatgaaccatgaatacatgtcctggtatcgacaagacccaggcatggggctgaggctgattcattactcagttgccatccagacaactgaccaaggagaagtccccaatggctacaatgtctccagatcaaccatcgaggatttcccgctcaggctgctgtcggctgctccctcccagacatctgtgtacttctgtgccagcagttacctggggaacaccggggagctgttttttggagaaggctctaggctgaccgtactggaggacctgaaaaacgtgttcccacccgaggtcgctgtgtttgagccatcagaagcagagatctcccacacccaaaaggccacactggtgtgcctggccacaggcttctaccccgaccatgtggagctgagctggtgggtgaatgggaaggaggtgcacagtggggtcagcacagacccgcagcccctcaaggagcagcccgccctcaatgactccagatacgctctgagcagccgcctgagggtctcggccaccttctggcaggacccccgcaaccacttccgctgtcaagtccagttctacgggctctcggagaatgacgagtggacccaggatagggccaaacccgtcacccagatcgtcagcgccgaggcctggggtagagcagacgccagcaccaagggcccctctgtgttccctctggccccttccagcaagtccacctctggcggaacagccgctctgggctgcctcgtgaaggactacttccccgagcctgtgaccgtgtcctggaactctggcgctctgaccagcggagtgcacaccttccctgctgtgctgcagtcctccggcctgtactccctgtcctccgtcgtgaccgtgccttccagctctctgggcacccagacctacatctgcaacgtgaaccacaagccctccaacaccaaggtggacaagaaggtggaacccaagtcctgcgacaagacccacacctgtcccccttgtcctctaacagacagagaatgggcagaagagtggaaacatcttgaccatctgttaaactgcataatggacatggtagaaaaaacaaggcgatctctcaccgtactaaggcggtgtcaagaagcagaccgggaagaattgaattactggatccggcggtacagtgacgccgag

SEQ ID NO: 25 - DNA, 1308 bp, Artificial Sequence
  Synthetic
atgagcctcgggctcctgtgctgtggggccttttctctcctgtgggcaggtccagtgaatgccggtgtcactcagaccccaaaattccaggtcctgaagacaggacagagcatgacactgcagtgtgcccaggatatgaaccatgaatacatgtcctggtatcgacaagacccaggcatggggctgaggctgattcattactcagttgccatccagacaactgaccaaggagaagtccccaatggctacaatgtctccagatcaaccatcgaggatttcccgctcaggctgctgtcggctgctccctcccagacatctgtgtacttctgtgccagcagttacctggggaacaccggggagctgttttttggagaaggctctaggctgaccgtactggaggacctgaaaaacgtgttcccacccgaggtcgctgtgtttgagccatcagaagcagagatctcccacacccaaaaggccacactggtgtgcctggccacaggcttctaccccgaccatgtggagctgagctggtgggtgaatgggaaggaggtgcacagtggggtcagcacagacccgcagcccctcaaggagcagcccgccctcaatgactccagatacgctctgagcagccgcctgagggtctcggccaccttctggcaggacccccgcaaccacttccgctgtcaagtccagttctacgggctctcggagaatgacgagtggacccaggatagggccaaacccgtcacccagatcgtcagcgccgaggcctggggtagagcagacgccagcaccaagggcccctctgtgttccctctggccccttccagcaagtccacctctggcggaacagccgctctgggctgcctcgtgaaggactacttccccgagcctgtgaccgtgtcctggaactctggcgctctgaccagcggagtgcacaccttccctgctgtgctgcagtcctccggcctgtactccctgtcctccgtcgtgaccgtgccttccagctctctgggcacccagacctacatctgcaacgtgaaccacaagccctccaacaccaaggtggacaagaaggtggaacccaagtcctgcgacaagacccacacctgtcccccttgtcctggaggaggtgggagcctaacagacagagaatgggcagaagagtggaaacatcttgaccatctgttaaactgcataatggacatggtagaaaaaacaaggcgatctctcaccgtactaaggcggtgtcaagaagcagaccgggaagaattgaattactggatccggcggtacagtgacgccgag

SEQ ID NO: 26 - DNA, 573 bp, Artificial Sequence
  Synthetic
atggagctggggctgagctgggtggtcctggctgctctactacaaggtgtccaggctcaggttcagctggttgaaagcggtggtgcactggttcagcctggtggtagcctgcgtctgagctgtgcagcaagcggttttccggttaatcgttatagcatgcgttggtatcgtcaggcaccgggtaaagaacgtgaatgggttgcaggtatgagcagtgccggtgatcgtagcagctatgaagatagcgttaaaggtcgttttaccatcagccgtgatgatgcacgtaataccgtttatctgcaaatgaatagcctgaaaccggaagataccgcagtgtattattgcaatgttaacgtgggctttgaatattggggtcagggcacccaggttaccgttagcagcaaactaacagacagagaatgggcagaagagtggaaacatcttgaccatctgttaaactgcataatggacatggtagaaaaaacaaggcgatctctcaccgtactaaggcggtgtcaagaagcagaccgggaagaattgaattactggatccggcggtacagtgacgccgag

SEQ ID NO: 27 - DNA, 588 bp, Artificial Sequence
  Synthetic
atggagctggggctgagctgggtggtcctggctgctctactacaaggtgtccaggctcaggttcagctggttgaaagcggtggtgcactggttcagcctggtggtagcctgcgtctgagctgtgcagcaagcggttttccggttaatcgttatagcatgcgttggtatcgtcaggcaccgggtaaagaacgtgaatgggttgcaggtatgagcagtgccggtgatcgtagcagctatgaagatagcgttaaaggtcgttttaccatcagccgtgatgatgcacgtaataccgtttatctgcaaatgaatagcctgaaaccggaagataccgcagtgtattattgcaatgttaacgtgggctttgaatattggggtcagggcacccaggttaccgttagcagcaaaggaggaggtgggagcctaacagacagagaatgggcagaagagtggaaacatcttgaccatctgttaaactgcataatggacatggtagaaaaaacaaggcgatctctcaccgtactaaggcggtgtcaagaagcagaccgggaagaattgaattactggatccggcggtacagtgacgccgag

SEQ ID NO: 28 - DNA, 972 bp, Artificial Sequence
  Synthetic
atggagctggggctgagctgggtggtcctggctgctctactacaaggtgtccaggctcaggttcagctggttgaaagcggtggtgcactggttcagcctggtggtagcctgcgtctgagctgtgcagcaagcggttttccggttaatcgttatagcatgcgttggtatcgtcaggcaccgggtaaagaacgtgaatgggttgcaggtatgagcagtgccggtgatcgtagcagctatgaagatagcgttaaaggtcgttttaccatcagccgtgatgatgcacgtaataccgtttatctgcaaatgaatagcctgaaaccggaagataccgcagtgtattattgcaatgttaacgtgggctttgaatattggggtcagggcacccaggttaccgttagcagcaaactaacagacagagaatgggcagaagagtggaaacatcttgaccatctgttaaactgcataatggacatggtagaaaaaacaaggcgatctctcaccgtactaaggcggtgtcaagaagcagaccgggaagaattgaattactggatccggcggtacagtgacgccgaggcacctacttcaagttctacaaagaaaacacagctacaactggagcatttactgctggatttacagatgattttgaatggaattaataattacaagaatcccaaactcaccaggatgctcacatttaagttttacatgcccaagaaggccacagaactgaaacatcttcagtgtctagaagaagaactcaaacctctggaggaagtgctaaatttagctcaaagcaaaaactttcacttaagacccagggacttaatcagcaatatcaacgtaatagttctggaactaaagggatctgaaacaacattcatgtgtgaatatgctgatgagacagcaaccattgtagaatttctgaacagatggattaccttttgtcaaagcatcatctcaacactgact

SEQ ID NO: 29 - DNA, 987 bp, Artificial Sequence
  Synthetic
atggagctggggctgagctgggtggtcctggctgctctactacaaggtgtccaggctcaggttcagctggttgaaagcggtggtgcactggttcagcctggtggtagcctgcgtctgagctgtgcagcaagcggttttccggttaatcgttatagcatgcgttggtatcgtcaggcaccgggtaaagaacgtgaatgggttgcaggtatgagcagtgccggtgatcgtagcagctatgaagatagcgttaaaggtcgttttaccatcagccgtgatgatgcacgtaataccgtttatctgcaaatgaatagcctgaaaccggaagataccgcagtgtattattgcaatgttaacgtgggctttgaatattggggtcagggcacccaggttaccgttagcagcaaaggaggaggtgggagcctaacagacagagaatgggcagaagagtggaaacatcttgaccatctgttaaactgcataatggacatggtagaaaaaacaaggcgatctctcaccgtactaaggcggtgtcaagaagcagaccgggaagaattgaattactggatccggcggtacagtgacgccgaggcacctacttcaagttctacaaagaaaacacagctacaactggagcatttactgctggatttacagatgattttgaatggaattaataattacaagaatcccaaactcaccaggatgctcacatttaagttttacatgcccaagaaggccacagaactgaaacatcttcagtgtctagaagaagaactcaaacctctggaggaagtgctaaatttagctcaaagcaaaaactttcacttaagacccagggacttaatcagcaatatcaacgtaatagttctggaactaaagggatctgaaacaacattcatgtgtgaatatgctgatgagacagcaaccattgtagaatttctgaacagatggattaccttttgtcaaagcatcatctcaacactgact

SEQ ID NO: 30 - DNA, 1182 bp, Artificial Sequence
  Synthetic
atggagaccctcttgggcctgcttatcctttggctgcagctgcaatgggtgagcagcaaacaggaggtgacacagattcctgcagctctgagtgtcccagaaggagaaaacttggttctcaactgcagtttcactgatagcgctatttacaacctccagtggtttaggcaggaccctgggaaaggtctcacatctctgttgcttattacaccttggcagagagagcaaacaagtggaagacttaatgcctcgctggataaatcatcaggacgtagtactttatacattgcagcttctcagcctggtgactcagccacctacctctgtgctgtgaggcccctgcttgacggaacatacatacctacatttggaagaggaaccagccttattgttcatccgtatatccagaaccctgaccctgccgtgtaccagctgagagactctaaatccagtgacaagtctgtctgcctattcaccgattttgattctcaaacaaatgtgtcacaaagtaaggattctgatgtgtatatcacagacaaaactgtgctagacatgaggtctatggacttcaagagcaacagtgctgtggcctggagcaacaaatctgactttgcatgtgcaaacgccttcaacaacagcattattccagaagacaccttcttccccagcccagaaagttccgccagcaccaagggcccctctgtgttccctctggccccttccagcaagtccacctctggcggaacagccgctctgggctgcctcgtgaaggactacttccccgagcctgtgaccgtgtcctggaactctggcgctctgaccagcggagtgcacaccttccctgctgtgctgcagtcctccggcctgtactccctgtcctccgtcgtgaccgtgccttccagctctctgggcacccagacctacatctgcaacgtgaaccacaagccctccaacaccaaggtggacaagaaggtgttgcatggcacacgtcaagaagaaatgattgatcacagactaacagacagagaatgggcagaagagtggaaacatcttgaccatctgttaaactgcataatggacatggtagaaaaaacaaggcgatctctcaccgtactaaggcggtgtcaagaagcagaccgggaagaattgaattactggatccggcggtacagtgacgccgag

SEQ ID NO: 31 - DNA, 1206 bp, Artificial Sequence
  Synthetic
atggagaccctcttgggcctgcttatcctttggctgcagctgcaatgggtgagcagcaaacaggaggtgacacagattcctgcagctctgagtgtcccagaaggagaaaacttggttctcaactgcagtttcactgatagcgctatttacaacctccagtggtttaggcaggaccctgggaaaggtctcacatctctgttgcttattacaccttggcagagagagcaaacaagtggaagacttaatgcctcgctggataaatcatcaggacgtagtactttatacattgcagcttctcagcctggtgactcagccacctacctctgtgctgtgaggcccctgcttgacggaacatacatacctacatttggaagaggaaccagccttattgttcatccgtatatccagaaccctgaccctgccgtgtaccagctgagagactctaaatccagtgacaagtctgtctgcctattcaccgattttgattctcaaacaaatgtgtcacaaagtaaggattctgatgtgtatatcacagacaaaactgtgctagacatgaggtctatggacttcaagagcaacagtgctgtggcctggagcaacaaatctgactttgcatgtgcaaacgccttcaacaacagcattattccagaagacaccttcttccccagcccagaaagttccgccagcaccaagggcccctctgtgttccctctggccccttccagcaagtccacctctggcggaacagccgctctgggctgcctcgtgaaggactacttccccgagcctgtgaccgtgtcctggaactctggcgctctgaccagcggagtgcacaccttccctgctgtgctgcagtcctccggcctgtactccctgtcctccgtcgtgaccgtgccttccagctctctgggcacccagacctacatctgcaacgtgaaccacaagccctccaacaccaaggtggacaagaaggtgggaggaggtgggagcttgcatggcacacgtcaagaagaaatgattgatcacagactaacagacagagaatgggcagaagagtggaaacatcttgaccatctgttaaactgcataatggacatggtagaaaaaacaaggcgatctctcaccgtactaaggcggtgtcaagaagcagaccgggaagaattgaattactggatccggcggtacagtgacgccgaggacttaaaa

SEQ ID NO: 32 - DNA, 1104 bp, Artificial Sequence
  Synthetic
atgagcctcgggctcctgtgctgtggggccttttctctcctgtgggcaggtccagtgaatgccggtgtcactcagaccccaaaattccaggtcctgaagacaggacagagcatgacactgcagtgtgcccaggatatgaaccatgaatacatgtcctggtatcgacaagacccaggcatggggctgaggctgattcattactcagttgccatccagacaactgaccaaggagaagtccccaatggctacaatgtctccagatcaaccatcgaggatttcccgctcaggctgctgtcggctgctccctcccagacatctgtgtacttctgtgccagcagttacctggggaacaccggggagctgttttttggagaaggctctaggctgaccgtactggaggacctgaaaaacgtgttcccacccgaggtcgctgtgtttgagccatcagaagcagagatctcccacacccaaaaggccacactggtgtgcctggccacaggcttctaccccgaccatgtggagctgagctggtgggtgaatgggaaggaggtgcacagtggggtcagcacagacccgcagcccctcaaggagcagcccgccctcaatgactccagatacgctctgagcagccgcctgagggtctcggccaccttctggcaggacccccgcaaccacttccgctgtcaagtccagttctacgggctctcggagaatgacgagtggacccaggatagggccaaacccgtcacccagatcgtcagcgccgaggcctggggtagagcagacacggtggccgctccctccgtgttcatcttcccaccttccgacgagcagctgaagtccggcaccgcttctgtcgtgtgcctgctgaacaacttctacccccgcgaggccaaggtgcagtggaaggtggacaacgccctgcagtccggcaactcccaggaatccgtgaccgagcaggactccaaggacagcacctactccctgtcctccaccctgaccctgtccaaggccgactacgagaagcacaaggtgtacgcctgcgaagtgacccaccagggcctgtctagccccgtgaccaagtctttcaaccggggcgagtgt

SEQ ID NO: 33 - DNA, 885 bp, Artificial Sequence
  Synthetic
atgaacttcgggctcagcttgattttccttgcccttattttaaaaggtgtccagtgtgaggtgcaactggtggagtctgggggaggcttagtgaagcctggggggtccctgaaactctcctgtgcagcctctggactcactttcagtagctatgccatgtcttgggttcgccagactccagagaagaggctggagtgggtcgcatccattagtagtggtggtttcacctactatccagacagtgtgaagggccgattcaccatctccagagataatgccaggaacatcctgtatctgcaaatgagcagtctgaggtctgaggacacggccatgtattactgtgcaagagacgaggtacgggggtacctcgatgtctggggcgcagggaccacggtcaccgtttcctcggccagcaccaagggcccctctgtgttccctctggccccttccagcaagtccacctctggcggaacagccgctctgggctgcctcgtgaaggactacttccccgagcctgtgaccgtgtcctggaactctggcgctctgaccagcggagtgcacaccttccctgctgtgctgcagtcctccggcctgtactccctgtcctccgtcgtgaccgtgccttccagctctctgggcacccagacctacatctgcaacgtgaaccacaagccctccaacaccaaggtggacaagaaggtgggaggaggtgggagcctaacagacagagaatgggcagaagagtggaaacatcttgaccatctgttaaactgcataatggacatggtagaaaaaacaaggcgatctctcaccgtactaaggcggtgtcaagaagcagaccgggaagaattgaattactggatccggcggtacagtgacgccgag

SEQ ID NO: 34 - DNA, 885 bp, Artificial Sequence; identical to SEQ ID NO: 33
  Synthetic

SEQ ID NO: 35 - DNA, 717 bp, Artificial Sequence
  Synthetic
atgaaatacctattgcctacggcagccgctggattgttattactcgcggcccagccggccatggcggcctacaaagatatccagatgacacagactacatcctccctgtctgcctctctgggagacagagtcaccatcagttgcagtgcaagtcagggcattagcaattatttaaactggtatcagcagaaaccagatggaactgttaaactcctgatctattacacatcaagtttacactcaggagtcccatcaaggttcagtggcagtgggtctgggacagattattctctcaccatcagcaacctggaacctgaagatattgccacttattattgtcagcagtatagcaagcttccgtacacgttcggaggggggaccaagctggaaataaaacgtacggtggccgctccctccgtgttcatcttcccaccttccgacgagcagctgaagtccggcaccgcttctgtcgtgtgcctgctgaacaacttctacccccgcgaggccaaggtgcagtggaaggtggacaacgccctgcagtccggcaactcccaggaatccgtgaccgagcaggactccaaggacagcacctactccctgtcctccaccctgaccctgtccaaggccgactacgagaagcacaaggtgtacgcctgcgaagtgacccaccagggcctgtctagccccgtgaccaagtctttcaaccggggcgagtgt

SEQ ID NO: 36 - DNA, 915 bp, Artificial Sequence
  Synthetic
atgaacttcgggctcagcttgattttccttgcccttattttaaaaggtgtccagtgtgaggtgcaactggtggagtctgggggaggcttagtgaagcctggggggtccctgaaactctcctgtgcagcctctggactcactttcagtagctatgccatgtcttgggttcgccagactccagagaagaggctggagtgggtcgcatccattagtagtggtggtttcacctactatccagacagtgtgaagggccgattcaccatctccagagataatgccaggaacatcctgtatctgcaaatgagcagtctgaggtctgaggacacggccatgtattactgtgcaagagacgaggtacgggggtacctcgatgtctggggcgcagggaccacggtcaccgtttcctcggccagcaccaagggcccctctgtgttccctctggccccttccagcaagtccacctctggcggaacagccgctctgggctgcctcgtgaaggactacttccccgagcctgtgaccgtgtcctggaactctggcgctctgaccagcggagtgcacaccttccctgctgtgctgcagtcctccggcctgtactccctgtcctccgtcgtgaccgtgccttccagctctctgggcacccagacctacatctgcaacgtgaaccacaagccctccaacaccaaggtggacaagaaggtggaacccaagtcctgcgacaagacccacacctgtcccccttgtcctctaacagacagagaatgggcagaagagtggaaacatcttgaccatctgttaaactgcataatggacatggtagaaaaaacaaggcgatctctcaccgtactaaggcggtgtcaagaagcagaccgggaagaattgaattactggatccggcggtacagtgacgccgag

SEQ ID NO: 37 - DNA, 930 bp, Artificial Sequence
  Synthetic
atgaacttcgggctcagcttgattttccttgcccttattttaaaaggtgtccagtgtgaggtgcaactggtggagtctgggggaggcttagtgaagcctggggggtccctgaaactctcctgtgcagcctctggactcactttcagtagctatgccatgtcttgggttcgccagactccagagaagaggctggagtgggtcgcatccattagtagtggtggtttcacctactatccagacagtgtgaagggccgattcaccatctccagagataatgccaggaacatcctgtatctgcaaatgagcagtctgaggtctgaggacacggccatgtattactgtgcaagagacgaggtacgggggtacctcgatgtctggggcgcagggaccacggtcaccgtttcctcggccagcaccaagggcccctctgtgttccctctggccccttccagcaagtccacctctggcggaacagccgctctgggctgcctcgtgaaggactacttccccgagcctgtgaccgtgtcctggaactctggcgctctgaccagcggagtgcacaccttccctgctgtgctgcagtcctccggcctgtactccctgtcctccgtcgtgaccgtgccttccagctctctgggcacccagacctacatctgcaacgtgaaccacaagccctccaacaccaaggtggacaagaaggtggaacccaagtcctgcgacaagacccacacctgtcccccttgtcctggaggaggtgggagcctaacagacagagaatgggcagaagagtggaaacatcttgaccatctgttaaactgcataatggacatggtagaaaaaacaaggcgatctctcaccgtactaaggcggtgtcaagaagcagaccgggaagaattgaattactggatccggcggtacagtgacgccgag

SEQ ID NO: 38 - DNA, 921 bp, Artificial Sequence
  Synthetic
atgggatggtcttgtataattctgttcctggtggcaacagcaacaggagtgcatagcgaggtgcagctggtggagtctgggggaggcttggtacagcccggcaggtccctgagactctcctgtgcggcctctggattcacctttgatgattatgccatgcactgggtccggcaagctccagggaagggcctggaatgggtctcagctatcacttggaatagtggtcacatagactatgcggactctgtggagggccgattcaccatctccagagacaacgccaagaactccctgtatctgcaaatgaacagtctgagagctgaggatacggccgtatattactgtgcgaaagtctcgtaccttagcaccgcgtcctcccttgactattggggccaaggtaccctggtcaccgtctcgagtgccagcaccaagggcccctctgtgttccctctggccccttccagcaagtccacctctggcggaacagccgctctgggctgcctcgtgaaggactacttccccgagcctgtgaccgtgtcctggaactctggcgctctgaccagcggagtgcacaccttccctgctgtgctgcagtcctccggcctgtactccctgtcctccgtcgtgaccgtgccttccagctctctgggcacccagacctacatctgcaacgtgaaccacaagccctccaacaccaaggtggacaagaaggtgttgcatggcacacgtcaagaagaaatgattgatcacagactaacagacagagaatgggcagaagagtggaaacatcttgaccatctgttaaactgcataatggacatggtagaaaaaacaaggcgatctctcaccgtactaaggcggtgtcaagaagcagaccgggaagaattgaattactggatccggcggtacagtgacgccgag

SEQ ID NO: 39 - DNA, 936 bp, Artificial Sequence
  Synthetic
atgggatggtcttgtataattctgttcctggtggcaacagcaacaggagtgcatagcgaggtgcagctggtggagtctgggggaggcttggtacagcccggcaggtccctgagactctcctgtgcggcctctggattcacctttgatgattatgccatgcactgggtccggcaagctccagggaagggcctggaatgggtctcagctatcacttggaatagtggtcacatagactatgcggactctgtggagggccgattcaccatctccagagacaacgccaagaactccctgtatctgcaaatgaacagtctgagagctgaggatacggccgtatattactgtgcgaaagtctcgtaccttagcaccgcgtcctcccttgactattggggccaaggtaccctggtcaccgtctcgagtgccagcaccaagggcccctctgtgttccctctggccccttccagcaagtccacctctggcggaacagccgctctgggctgcctcgtgaaggactacttccccgagcctgtgaccgtgtcctggaactctggcgctctgaccagcggagtgcacaccttccctgctgtgctgcagtcctccggcctgtactccctgtcctccgtcgtgaccgtgccttccagctctctgggcacccagacctacatctgcaacgtgaaccacaagccctccaacaccaaggtggacaagaaggtgggaggaggtgggagcttgcatggcacacgtcaagaagaaatgattgatcacagactaacagacagagaatgggcagaagagtggaaacatcttgaccatctgttaaactgcataatggacatggtagaaaaaacaaggcgatctctcaccgtactaaggcggtgtcaagaagcagaccgggaagaattgaattactggatccggcggtacagtgacgccgag

SEQ ID NO: 40 - DNA, 708 bp, Artificial Sequence
  Synthetic
atggacatgagggtccctgctcagctcctgggactcctgctgctctggctcccagataccagatgtgacatccagatgacccagtctccatcctccctgtctgcatctgtaggggacagagtcaccatcacttgtcgggcaagtcagggcatcagaaattacttagcctggtatcagcaaaaaccagggaaagcccctaagctcctgatctatgctgcatccactttgcaatcaggggtcccatctcggttcagtggcagtggatctgggacagatttcactctcaccatcagcagcctacagcctgaagatgttgcaacttattactgtcaaaggtataaccgtgcaccgtatacttttggccaggggaccaaggtggaaatcaaacgtacggtggccgctccctccgtgttcatcttcccaccttccgacgagcagctgaagtccggcaccgcttctgtcgtgtgcctgctgaacaacttctacccccgcgaggccaaggtgcagtggaaggtggacaacgccctgcagtccggcaactcccaggaatccgtgaccgagcaggactccaaggacagcacctactccctgtcctccaccctgaccctgtccaaggccgactacgagaagcacaaggtgtacgcctgcgaagtgacccaccagggcctgtctagccccgtgaccaagtctttcaaccggggcgagtgt

SEQ ID NO: 41 - DNA, 927 bp, Artificial Sequence
  Synthetic
atgggatggtcttgtataattctgttcctggtggcaacagcaacaggagtgcatagcgaggtccaacttgtcgaaagtggcggcggtttggttcaacctggaggttcacttcgactgtcatgtgcagcgagcggttatacatttacgaattatggcatgaattgggttagacaggcaccaggaaagggactggagtgggtaggctggatcaatacctacacaggagaaccaacgtatgccgcagacttcaaacgacggtttacattttccttggatacctctaagtctacagcgtatctccaaatgaattcacttcgagcggaagataccgcggtctactattgcgccaaataccctcattattatgggtcatctcactggtatttcgatgtctggggtcagggaacactggtaaccgtgtcatccgccagcaccaagggcccctctgtgttccctctggccccttccagcaagtccacctctggcggaacagccgctctgggctgcctcgtgaaggactacttccccgagcctgtgaccgtgtcctggaactctggcgctctgaccagcggagtgcacaccttccctgctgtgctgcagtcctccggcctgtactccctgtcctccgtcgtgaccgtgccttccagctctctgggcacccagacctacatctgcaacgtgaaccacaagccctccaacaccaaggtggacaagaaggtgttgcatggcacacgtcaagaagaaatgattgatcacagactaacagacagagaatgggcagaagagtggaaacatcttgaccatctgttaaactgcataatggacatggtagaaaaaacaaggcgatctctcaccgtactaaggcggtgtcaagaagcagaccgggaagaattgaattactggatccggcggtacagtgacgccgag

SEQ ID NO: 42 - DNA, 942 bp, Artificial Sequence
  Synthetic
atgggatggtcttgtataattctgttcctggtggcaacagcaacaggagtgcatagcgaggtccaacttgtcgaaagtggcggcggtttggttcaacctggaggttcacttcgactgtcatgtgcagcgagcggttatacatttacgaattatggcatgaattgggttagacaggcaccaggaaagggactggagtgggtaggctggatcaatacctacacaggagaaccaacgtatgccgcagacttcaaacgacggtttacattttccttggatacctctaagtctacagcgtatctccaaatgaattcacttcgagcggaagataccgcggtctactattgcgccaaataccctcattattatgggtcatctcactggtatttcgatgtctggggtcagggaacactggtaaccgtgtcatccgccagcaccaagggcccctctgtgttccctctggccccttccagcaagtccacctctggcggaacagccgctctgggctgcctcgtgaaggactacttccccgagcctgtgaccgtgtcctggaactctggcgctctgaccagcggagtgcacaccttccctgctgtgctgcagtcctccggcctgtactccctgtcctccgtcgtgaccgtgccttccagctctctgggcacccagacctacatctgcaacgtgaaccacaagccctccaacaccaaggtggacaagaaggtgggaggaggtgggagcttgcatggcacacgtcaagaagaaatgattgatcacagactaacagacagagaatgggcagaagagtggaaacatcttgaccatctgttaaactgcataatggacatggtagaaaaaacaaggcgatctctcaccgtactaaggcggtgtcaagaagcagaccgggaagaattgaattactggatccggcggtacagtgacgccgag

SEQ ID NO: 43 - DNA, 708 bp, Artificial Sequence
  Synthetic
atggacatgagggtccctgctcagctcctggggctcctgcagctctggctctcaggtgccagatgtgacatccaaatgacccagagtccttccagcctcagtgcgtcagtgggagatcgagtgacgataacgtgttctgccagccaagacatttccaactatcttaattggtaccagcagaaaccgggaaaggccccgaaagtgctcatatactttaccagcagtcttcactctggagttcctagccggtttagcggctcaggtagtggcaccgatttcactctgaccattagttctcttcaaccggaagattttgcaacctactattgtcagcagtattcaacggtaccttggaccttcggccaaggcaccaaagtcgagattaagcgtacggtggccgctccctccgtgttcatcttcccaccttccgacgagcagctgaagtccggcaccgcttctgtcgtgtgcctgctgaacaacttctacccccgcgaggccaaggtgcagtggaaggtggacaacgccctgcagtccggcaactcccaggaatccgtgaccgagcaggactccaaggacagcacctactccctgtcctccaccctgaccctgtccaaggccgactacgagaagcacaaggtgtacgcctgcgaagtgacccaccagggcctgtctagccccgtgaccaagtctttcaaccggggcgagtgt

SEQ ID NO: 44 - DNA, 609 bp, Artificial Sequence
  Synthetic
atggatatgcgcgtcccggcacagctgctcggcttgttgttgctgtggttgagagctaggtgcgatatacagatgactcagtccccttccagtctttcagccagtgtcggcgaccgggttaccattacttgtcgggcaagtcaatctatagatagttatttgcattggtatcaacaaaaaccaggcaaagcgcctaagttgttgatatattccgcatctgaactgcaatcaggcgttccttcacgcttttctggaagcggcagcggaaccgatttcactcttaccataagtagtctccagccggaggattttgctacatactattgtcaacaagtagtgtggcgaccgttcaccttcggacaggggacaaaagtagaaatcaagcggggaggaggtgggagcttgcatggcacacgtcaagaagaaatgattgatcacagactaacagacagagaatgggcagaagagtggaaacatcttgaccatctgttaaactgcataatggacatggtagaaaaaacaaggcgatctctcaccgtactaaggcggtgtcaagaagcagaccgggaagaattgaattactggatccggcggtacagtgacgccgag

SEQ ID NO: 45 - DNA, 633 bp, Artificial Sequence
  Synthetic
atggagtttggcctcagttggttgtttttggtagcgaaaattaaagtacagtgtgaagtccaactcctggagagcggggggggtctggtacaaccaggcggctcactgcggcttagctgcgcagcctccgggttcacgttcgcacatgaaacgatggtgtgggtgcgccaggcaccggggaagggactcgaatgggtctcacatatacctcctgacggtcaggatcctttttacgcggactctgtgaagggacgattcacaataagtagagacaatagtaagaacaccctttatttgcagatgaacagtctgcgggcggaagatacagcagtatatcattgtgccctgctgcccaaacgaggtccgtggtttgactattggggacaggggactctcgttactgtaagctccggaggaggtgggagcttgcatggcacacgtcaagaagaaatgattgatcacagactaacagacagagaatgggcagaagagtggaaacatcttgaccatctgttaaactgcataatggacatggtagaaaaaacaaggcgatctctcaccgtactaaggcggtgtcaagaagcagaccgggaagaattgaattactggatccggcggtacagtgacgccgag

SEQ ID NO: 46 - DNA, 606 bp, Artificial Sequence
  Synthetic
atggacatgagggtccccgctcagctcctggggctcctgctactctggctccgagccagatgtgatatacagatgacccaatcaccaagcagcttgtccgcttcagtgggcgacagggtaactataacatgccgcgcaagccaatggataggtccagaactctcatggtaccaacaaaaaccagggaaagcgccgaaactgcttatctatcacacaagcattttgcaatctggggtacctagtcgattcagtggctctggcagtgggactgactttacactcaccataagttctctccaaccagaggactttgcaacatactattgtcagcaatatatgtttcaaccacgcacctttggacaaggcacaaaagttgaaatccgcggaggaggtgggagcttgcatggcacacgtcaagaagaaatgattgatcacagactaacagacagagaatgggcagaagagtggaaacatcttgaccatctgttaaactgcataatggacatggtagaaaaaacaaggcgatctctcaccgtactaaggcggtgtcaagaagcagaccgggaagaattgaattactggatccggcggtacagtgacgccgag

SEQ ID NO: 47 - DNA, 609 bp, Artificial Sequence
  Synthetic
atggacatgagggtccccgctcagctcctggggctcctgctactctggctccgagccagatgtgatattcaaatgacacagtcaccaacgagtctttccgcgagcgttggggaccgagtgacaataacttgtcgagcctctcagtggattggcaacttgctggactggtatcagcaaaagccgggagaagccccgaagctgctcatatactatgcttccttcctccagagtggagtacctagcagattcagcggggggggattcgggactgatttcactcttacaatcagctctcttcaacccgaggacttcgcaacgtactactgtcaacaagctaaccctgcgccgcttactttcggacaaggcactaaggtcgaaattaagcgaggaggaggtgggagcttgcatggcacacgtcaagaagaaatgattgatcacagactaacagacagagaatgggcagaagagtggaaacatcttgaccatctgttaaactgcataatggacatggtagaaaaaacaaggcgatctctcaccgtactaaggcggtgtcaagaagcagaccgggaagaattgaattactggatccggcggtacagtgacgccgag

SEQ ID NO: 48 - DNA, 954 bp, Artificial Sequence
  Synthetic
atggacatgagggtccccgctcagctcctggggctcctgctactctggctccgagccagatgtgatatacagatgacccaatcaccaagcagcttgtccgcttcagtgggcgacagggtaactataacatgccgcgcaagccaatggataggtccagaactctcatggtaccaacaaaaaccagggaaagcgccgaaactgcttatctatcacacaagcattttgcaatctggggtacctagtcgattcagtggctctggcagtgggactgactttacactcaccataagttctctccaaccagaggactttgcaacatactattgtcagcaatatatgtttcaaccacgcacctttggacaaggcacaaaagttgaaatccgcggaggaggtgggagcttgcatggcacacgtcaagaagaaatgattgatcacagactaacagacagagaatgggcagaagagtggaaacatcttgaccatctgttaaactgcataatggacatggtagaaaaaacaaggcgatctctcaccgtactaaggcggtgtcaagaagcagaccgggaagaattgaattactggatccggcggtacagtgacgccgaggacttaaaaggtggaggaggtagcgatattcaaatgacacagtcaccaacgagtctttccgcgagcgttggggaccgagtgacaataacttgtcgagcctctcagtggattggcaacttgctggactggtatcagcaaaagccgggagaagccccgaagctgctcatatactatgcttccttcctccagagtggagtacctagcagattcagcggggggggattcgggactgatttcactcttacaatcagctctcttcaacccgaggacttcgcaacgtactactgtcaacaagctaaccctgcgccgcttactttcggacaaggcactaaggtcgaaattaagcga

SEQ ID NO: 49 - DNA, 609 bp, Artificial Sequence
  Synthetic
atggacatgagggtccccgctcagctcctggggctcctgctactctggctccgagccagatgtgacattcagatgactcagtcaccatcctcattgtctgcatcagttggtgaccgagttacgatcacatgtcgagcaagccaaaatatagattccagactttcatggtaccagcagaagcctggtaaagcgccgaaactcctcatatatcgcacgagcgtattgcaatctggtgtgccttctcgattttcaggatctgggtctggcactgacttcaccttgacaatatcttctcttcagcccgaagatttcgctacctactactgccaacaatgggacatgtttcctctgaccttcggacagggtacaaaggtcgagattaaacggggaggaggtgggagcttgcatggcacacgtcaagaagaaatgattgatcacagactaacagacagagaatgggcagaagagtggaaacatcttgaccatctgttaaactgcataatggacatggtagaaaaaacaaggcgatctctcaccgtactaaggcggtgtcaagaagcagaccgggaagaattgaattactggatccggcggtacagtgacgccgag

SEQ ID NO: 50 - DNA, 957 bp, Artificial Sequence
  Synthetic
atggacatgagggtccccgctcagctcctggggctcctgctactctggctccgagccagatgtgacattcagatgactcagtcaccatcctcattgtctgcatcagttggtgaccgagttacgatcacatgtcgagcaagccaaaatatagattccagactttcatggtaccagcagaagcctggtaaagcgccgaaactcctcatatatcgcacgagcgtattgcaatctggtgtgccttctcgattttcaggatctgggtctggcactgacttcaccttgacaatatcttctcttcagcccgaagatttcgctacctactactgccaacaatgggacatgtttcctctgaccttcggacagggtacaaaggtcgagattaaacggggaggaggtgggagcttgcatggcacacgtcaagaagaaatgattgatcacagactaacagacagagaatgggcagaagagtggaaacatcttgaccatctgttaaactgcataatggacatggtagaaaaaacaaggcgatctctcaccgtactaaggcggtgtcaagaagcagaccgggaagaattgaattactggatccggcggtacagtgacgccgaggacttaaaaggtggaggaggtagcgatatacagatgactcaatccccttcatccctctcagcttccgtaggggacagagttactataacgtgtcgagctagtcaagacataggtgatcgcctgaggtggtatcagcaaaaaccgggtaaagcacctaaactcctcatatatcatggttccaggttggagtcaggcgtgccgtcacgattctctgggtcacgctctggcactgacttcacattgacgattagttctctccagcccgaagacttcgccacctactactgtcaacagcaatggtttcgcccgtatacttttgggcagggtacaaaggttgagattaaacgg

SEQ ID NO: 51 - protein, 121 aa, Artificial Sequence [sequence omitted]

SEQ ID NO: 52 - protein, 108 aa, Artificial Sequence
  Synthetic
DIQMTQSPSSLSASVGDRVTITCRASQGIRNYLAWYQQKPGKAPKLLIYAASTLQSGVPSRFSGSGSGTDFTLTISSLQPEDVATYYCQRYNRAPYTFGQGTKVEIKR

SEQ ID NO: 53 - protein, 121 aa, Artificial Sequence [sequence omitted]

SEQ ID NO: 54 - protein, 107 aa, Artificial Sequence
  Synthetic
QIVLSQSPAILSASPGEKVTMTCRASSSVSYIHWFQQKPGSSPKPWIYATSNLASGVPVRFSGSGSGTSYSLTISRVEAEDAATYYCQQWTSNPPTFGGGTKLEIKR

SEQ ID NO: 55 - protein, 123 aa, Artificial Sequence [sequence omitted]

SEQ ID NO: 56 - protein, 108 aa, Artificial Sequence
  Synthetic
DIQMTQSPSSLSASVGDRVTITCSASQDISNYLNWYQQKPGKAPKVLIYFTSSLHSGVPSRFSGSGSGTDFTLTISSLQPEDFATYYCQQYSTVPWTFGQGTKVEIKR

SEQ ID NO: 57 - protein, 119 aa, Artificial Sequence [sequence omitted]

SEQ ID NO: 58 - protein, 108 aa, Artificial Sequence
  Synthetic
DIQMTQSPSSLSASVGDRVTITCKASQDVSIGVAWYQQKPGKAPKLLIYSASYRYTGVPSRFSGSGSGTDFTLTISSLQPEDFATYYCQQYYIYPYTFGQGTKVEIKR

SEQ ID NO: 59 - protein, 119 aa, Artificial Sequence
  Synthetic
EVQLQESGPGLVRPSQTLSLTCTVSGYSITSDHAWSWVRQPPGRGLEWIGYISYSGITTYNPSLKSRVTMLRDTSKNQFSLRLSSVTAADTAVYYCARSLARTTAMDYWGQGSLVTVSS

SEQ ID NO: 60 - protein, 108 aa, Artificial Sequence
  Synthetic
DIQMTQSPSSLSASVGDRVTITCRASQDISSYLNWYQQKPGKAPKLLIYYTSRLHSGVPSRFSGSGSGTDFTFTISSLQPEDIATYYCQQGNTLPYTFGQGTKVEIKR

SEQ ID NO: 61 - protein, 113 aa, Artificial Sequence [sequence omitted]

SEQ ID NO: 62 - protein, 108 aa, Artificial Sequence
  Synthetic
EIVLTQSPATLSLSPGERATLSCRASQSVSSYLAWYQQKPGQAPRLLIYDASNRATGIPARFSGSGSGTDFTLTISSLEPEDFAVYYCQQSSNWPRTFGQGTKVEIKR

SEQ ID NO: 63 - protein, 118 aa, Artificial Sequence
  Synthetic
QVQLVESGGGVVQPGRSLRLSCAASGFTFSSYTMHWVRQAPGKGLEWVTFISYDGNNKYYADSVKGRFTISRDNSKNTLYLQMNSLRAEDTAIYYCARTGWLGPFDYWGQGTLVTVSS

SEQ ID NO: 64 - protein, 109 aa, Artificial Sequence
  Synthetic
EIVLTQSPGTLSLSPGERATLSCRASQSVGSSYLAWYQQKPGQAPRLLIYGAFSRATGIPDRFSGSGSGTDFTLTISRLEPEDFAVYYCQQYGSSPWTFGQGTKVEIKR

SEQ ID NO: 65 - protein, 119 aa, Artificial Sequence
  Synthetic
EVQLLESGGGLVQPGGSLRLSCAASGFTFAHETMVWVRQAPGKGLEWVSHIPPDGQDPFYADSVKGRFTISRDNSKNTLYLQMNSLRAEDTAVYHCALLPKRGPWFDYWGQGTLVTVSS

SEQ ID NO: 66 - protein, 108 aa, Artificial Sequence
  Synthetic
DIQMTQSPSSLSASVGDRVTITCRASQSIDSYLHWYQQKPGKAPKLLIYSASELQSGVPSRFSGSGSGTDFTLTISSLQPEDFATYYCQQVVWRPFTFGQGTKVEIKR

SEQ ID NO: 67 - protein, 107 aa, Artificial Sequence
  Synthetic
DIQMTQSPSSLSASVGDRVTITCRASQWIGPELSWYQQKPGKAPKLLIYHTSILQSGVPSRFSGSGSGTDFTLTISSLQPEDFATYYCQQYMFQPRTFGQGTKVEIR

SEQ ID NO: 68 - protein, 108 aa, Artificial Sequence
  Synthetic
DIQMTQSPTSLSASVGDRVTITCRASQWIGNLLDWYQQKPGEAPKLLIYYASFLQSGVPSRFSGGGFGTDFTLTISSLQPEDFATYYCQQANPAPLTFGQGTKVEIKR

SEQ ID NO: 69 - protein, 108 aa, Artificial Sequence
  Synthetic
DIQMTQSPSSLSASVGDRVTITCRASQNIDSRLSWYQQKPGKAPKLLIYRTSVLQSGVPSRFSGSGSGTDFTLTISSLQPEDFATYYCQQWDMFPLTFGQGTKVEIKR

SEQ ID NO: 70 - protein, 108 aa, Artificial Sequence
  Synthetic
DIQMTQSPSSLSASVGDRVTITCRASQDIGDRLRWYQQKPGKAPKLLIYHGSRLESGVPSRFSGSRSGTDFTLTISSLQPEDFATYYCQQQWFRPYTFGQGTKVEIKR

SEQ ID NO: 71 - protein, 115 aa, Artificial Sequence
  Synthetic
KQEVTQIPAALSVPEGENLVLNCSFTDSAIYNLQWFRQDPGKGLTSLLLITPWQREQTSGRLNASLDKSSGRSTLYIAASQPGDSATYLCAVRPLLDGTYIPTFGRGTSLIVHPY

SEQ ID NO: 72 - protein, 112 aa, Artificial Sequence
  Synthetic
NAGVTQTPKFQVLKTGQSMTLQCAQDMNHEYMSWYRQDPGMGLRLIHYSVAIQTDQGEVPNGYNVSRSTIEDFPLRLLSAAPSQTSVYFCASSYLGNTGELFFGEGSRLTVL

SEQ ID NO: 73 - protein, 133 aa, Homo sapiens [sequence omitted]

SEQ ID NO: 74 - protein, 115 aa, Artificial Sequence [sequence omitted]

SEQ ID NO: 75 - protein, 108 aa, Artificial Sequence
  Synthetic
DIQMTQSPSSLSASVGDRVTITCRASQSIIKHLKWYQQKPGKAPKLLIYGASRLQSGVPSRFSGSGSGTDFTLTISSLQPEDFATYYCQQGARWPQTFGQGTKVEIKR

SEQ ID NO: 76 - protein, 104 aa, Artificial Sequence
  Synthetic
SDTGRPFVEMYSEIPEIIHMTEGRELVIPCRVTSPNITVTLKKFPLDTLIPDGKRIIWDSRKGFIISNATYKEIGLLTCEATVNGHLYKTNYLTHRQTNTIIDV

SEQ ID NO: 77 - protein, 101 aa, Artificial Sequence
  Synthetic
VLSPSHGIELSVGEKLVLNCTARTELNVGIDFNWEYPSSKHQHKKLVNRDLKTQSGSEMKKFLSTLTIDGVTRSDQGLYTCAASSGLMTKKNSTFVRVHEK

SEQ ID NO: 78 - protein, 431 aa, Artificial Sequence
  Synthetic
SDTGRPFVEMYSEIPEIIHMTEGRELVIPCRVTSPNITVTLKKFPLDTLIPDGKRIIWDSRKGFIISNATYKEIGLLTCEATVNGHLYKTNYLTHRQTNTIIDVVLSPSHGIELSVGEKLVLNCTARTELNVGIDFNWEYPSSKHQHKKLVNRDLKTQSGSEMKKFLSTLTIDGVTRSDQGLYTCAASSGLMTKKNSTFVRVHEKDKTHTCPPCPAPELLGGPSVFLFPPKPKDTLMISRTPEVTCVVVDVSHEDPEVKFNWYVDGVEVHNAKTKPREEQYNSTYRVVSVLTVLHQDWLNGKEYKCKVSNKALPAPIEKTISKAKGQPREPQVYTLPPSRDELTKNQVSLTCLVKGFYPSDIAVEWESNGQPENNYKTTPPVLDSDGSFFLYSKLTVDKSRWQQGNVFSCSVMHEALHNHYTQKSLSLSPG

SEQ ID NO: 79 - protein, 31 aa, Artificial Sequence
  Synthetic
HAPGTFTSDVSSYLEGQAAKEFIAWLVKGRG

SEQ ID NO: 80 - protein, 34 aa, Artificial Sequence
  Synthetic
IKPEAPGEDASPEELNRYYASLRHYLNLVTRQRY

SEQ ID NO: 81 - protein, 39 aa, Artificial Sequence
  Synthetic
HGEGTFTSDLSKQMEEEAVRLFIEWLKNGGPSSGAPPPS

SEQ ID NO: 82 - protein, 275 aa, Artificial Sequence
  Synthetic
HGEGTFTSDVSSYLEEQAAKEFIAWLVKGGGGGGGSGGGGSGGGGSAESKYGPPCPPCPAPEAAGGPSVFLFPPKPKDTLMISRTPEVTCVVVDVSQEDPEVQFNWYVDGVEVHNAKTKPREEQFNSTYRVVSVLTVLHQDWLNGKEYKCKVSNKGLPSSIEKTISKAKGQPREPQVYTLPPSQEEMTKNQVSLTCLVKGFYPSDIAVEWESNGQPENNYKTTPPVLDSDGSFFLYSRLTVDKSRWQEGNVFSCSVMHEALHNHYTQKSLSLSLG

SEQ ID NO: 83 - protein, 397 aa, Artificial Sequence
  Synthetic
NAGVTQTPKFQVLKTGQSMTLQCAQDMNHEYMSWYRQDPGMGLRLIHYSVAIQTTDQGEVPNGYNVSRSTIEDFPLRLLSAAPSQTSVYFCASSYLGNTGELFFGEGSRLTVLEDLKNVFPPEVAVFEPSEAEISHTQKATLVCLATGFYPDHVELSWWVNGKEVHSGVSTDPQPLKEQPALNDSRYALSSRLRVSATFWQDPRNHFRCQVQFYGLSENDEWTQDRAKPVTQIVSAEAWGRADASTKGPSVFPLAPSSKSTSGGTAALGCLVKDYFPEPVTVSWNSGALTSGVHTFPAVLQSSGLYSLSSVVTVPSSSLGTQTYICNVNHKPSNTKVDKKVLTDREWAEEWKHLDHLLNCIMDMVEKTRRSLTVLRRCQEADREELNYWIRRYSDAE

SEQ ID NO: 84 - protein, 402 aa, Artificial Sequence
  Synthetic
NAGVTQTPKFQVLKTGQSMTLQCAQDMNHEYMSWYRQDPGMGLRLIHYSVAIQTTDQGEVPNGYNVSRSTIEDFPLRLLSAAPSQTSVYFCASSYLGNTGELFFGEGSRLTVLEDLKNVFPPEVAVFEPSEAEISHTQKATLVCLATGFYPDHVELSWWVNGKEVHSGVSTDPQPLKEQPALNDSRYALSSRLRVSATFWQDPRNHFRCQVQFYGLSENDEWTQDRAKPVTQIVSAEAWGRADASTKGPSVFPLAPSSKSTSGGTAALGCLVKDYFPEPVTVSWNSGALTSGVHTFPAVLQSSGLYSLSSVVTVPSSSLGTQTYICNVNHKPSNTKVDKKVGGGGSLTDREWAEEWKHLDHLLNCIMDMVEKTRRSLTVLRRCQEADREELNYWIRRYSDAE

SEQ ID NO: 85 - protein, 397 aa, Artificial Sequence
  Synthetic
NAGVTQTPKFQVLKTGQSMTLQCAQDMNHEYMSWYRQDPGMGLRLIHYSVAIQTTDQGEVPNGYNVSRSTIEDFPLRLLSAAPSQTSVYFCASSYLGNTGELFFGEGSRLTVLEDLKNVFPPEVAVFEPSEAEISHTQKATLVCLATGFYPDHVELSWWVNGKEVHSGVCTDPQPLKEQPALNDSRYALSSRLRVSATFWQDPRNHFRCQVQFYGLSENDEWTQDRAKPVTQIVSAEAWGRADASTKGPSVFPLAPSSKSTSGGTAALGCLVKDYFPEPVTVSWNSGALTSGVHTFPAVLQSSGLYSLSSVVTVPSSSLGTQTYICNVNHKPSNTKVDKKVLTDREWAEEWKHLDHLLNCIMDMVEKTRRSLTVLRRCQEADREELNYWIRRYSDAE

SEQ ID NO: 86 - protein, 402 aa, Artificial Sequence
  Synthetic
NAGVTQTPKFQVLKTGQSMTLQCAQDMNHEYMSWYRQDPGMGLRLIHYSVAIQTTDQGEVPNGYNVSRSTIEDFPLRLLSAAPSQTSVYFCASSYLGNTGELFFGEGSRLTVLEDLKNVFPPEVAVFEPSEAEISHTQKATLVCLATGFYPDHVELSWWVNGKEVHSGVCTDPQPLKEQPALNDSRYALSSRLRVSATFWQDPRNHFRCQVQFYGLSENDEWTQDRAKPVTQIVSAEAWGRADASTKGPSVFPLAPSSKSTSGGTAALGCLVKDYFPEPVTVSWNSGALTSGVHTFPAVLQSSGLYSLSSVVTVPSSSLGTQTYICNVNHKPSNTKVDKKVGGGGSLTDREWAEEWKHLDHLLNCIMDMVEKTRRSLTVLRRCQEADREELNYWIRRYSDAE

SEQ ID NO: 87 - protein, 299 aa, Artificial Sequence
  Synthetic
NAGVTQTPKFQVLKTGQSMTLQCAQDMNHEYMSWYRQDPGMGLRLIHYSVAIQTTDQGEVPNGYNVSRSTIEDFPLRLLSAAPSQTSVYFCASSYLGNTGELFFGEGSRLTVLEDLKNVFPPEVAVFEPSEAEISHTQKATLVCLATGFYPDHVELSWWVNGKEVHSGVCTDPQPLKEQPALNDSRYALSSRLRVSATFWQDPRNHFRCQVQFYGLSENDEWTQDRAKPVTQIVSAEAWGRADLTDREWAEEWKHLDHLLNCIMDMVEKTRRSLTVLRRCQEADREELNYWIRRYSDAE

SEQ ID NO: 88 - protein, 304 aa, Artificial Sequence
  Synthetic
NAGVTQTPKFQVLKTGQSMTLQCAQDMNHEYMSWYRQDPGMGLRLIHYSVAIQTTDQGEVPNGYNVSRSTIEDFPLRLLSAAPSQTSVYFCASSYLGNTGELFFGEGSRLTVLEDLKNVFPPEVAVFEPSEAEISHTQKATLVCLATGFYPDHVELSWWVNGKEVHSGVCTDPQPLKEQPALNDSRYALSSRLRVSATFWQDPRNHFRCQVQFYGLSENDEWTQDRAKPVTQIVSAEAWGRADGGGGSLTDREWAEEWKHLDHLLNCIMDMVEKTRRSLTVLRRCQEADREELNYWIRRYSDAE

SEQ ID NO: 89 - protein, 314 aa, Artificial Sequence
  Synthetic
KQEVTQIPAALSVPEGENLVLNCSFTDSAIYNLQWFRQDPGKGLTSLLLITPWQREQTSGRLNASLDKSSGRSTLYIAASQPGDSATYLCAVRPLLDGTYIPTFGRGTSLIVHPYIQNPDPAVYQLRDSKSSDKSVCLFTDFDSQTNVSQSKDSDVYITDKTVLDMRSMDFKSNSAVAWSNKSDFACANAFNNSIIPEDTFFPSPESSTVAAPSVFIFPPSDEQLKSGTASVVCLLNNFYPREAKVQWKVDNALQSGNSQESVTEQDSKDSTYSLSSTLTLSKADYEKHKVYACEVTHQGLSSPVTKSFNRGEC

SEQ ID NO: 90 - protein, 314 aa, Artificial Sequence
  Synthetic
KQEVTQIPAALSVPEGENLVLNCSFTDSAIYNLQWFRQDPGKGLTSLLLITPWQREQTSGRLNASLDKSSGRSTLYIAASQPGDSATYLCAVRPLLDGTYIPTFGRGTSLIVHPYIQNPDPAVYQLRDSKSSDKSVCLFTDFDSQTNVSQSKDSDVYITDKCVLDMRSMDFKSNSAVAWSNKSDFACANAFNNSIIPEDTFFPSPESSTVAAPSVFIFPPSDEQLKSGTASVVCLLNNFYPREAKVQWKVDNALQSGNSQESVTEQDSKDSTYSLSSTLTLSKADYEKHKVYACEVTHQGLSSPVTKSFNRGEC

SEQ ID NO: 91 - protein, 208 aa, Artificial Sequence
  Synthetic
KQEVTQIPAALSVPEGENLVLNCSFTDSAIYNLQWFRQDPGKGLTSLLLITPWQREQTSGRLNASLDKSSGRSTLYIAASQPGDSATYLCAVRPLLDGTYIPTFGRGTSLIVHPYIQNPDPAVYQLRDSKSSDKSVCLFTDFDSQTNVSQSKDSDVYITDKCVLDMRSMDFKSNSAVAWSNKSDFACANAFNNSIIPEDTFFPSPESS

SEQ ID NO: 92 - protein, 530 aa, Artificial Sequence
  Synthetic
NAGVTQTPKFQVLKTGQSMTLQCAQDMNHEYMSWYRQDPGMGLRLIHYSVAIQTTDQGEVPNGYNVSRSTIEDFPLRLLSAAPSQTSVYFCASSYLGNTGELFFGEGSRLTVLEDLKNVFPPEVAVFEPSEAEISHTQKATLVCLATGFYPDHVELSWWVNGKEVHSGVSTDPQPLKEQPALNDSRYALSSRLRVSATFWQDPRNHFRCQVQFYGLSENDEWTQDRAKPVTQIVSAEAWGRADASTKGPSVFPLAPSSKSTSGGTAALGCLVKDYFPEPVTVSWNSGALTSGVHTFPAVLQSSGLYSLSSVVTVPSSSLGTQTYICNVNHKPSNTKVDKKVLTDREWAEEWKHLDHLLNCIMDMVEKTRRSLTVLRRCQEADREELNYWIRRYSDAEAPTSSSTKKTQLQLEHLLLDLQMILNGINNYKNPKLTRMLTFKFYMPKKATELKHLQCLEEELKPLEEVLNLAQSKNFHLRPRDLISNINVIVLELKGSETTFMCEYADETATIVEFLNRWITFCQSIISTLT

SEQ ID NO: 93 - protein, 535 aa, Artificial Sequence
  Synthetic
NAGVTQTPKFQVLKTGQSMTLQCAQDMNHEYMSWYRQDPGMGLRLIHYSVAIQTTDQGEVPNGYNVSRSTIEDFPLRLLSAAPSQTSVYFCASSYLGNTGELFFGEGSRLTVLEDLKNVFPPEVAVFEPSEAEISHTQKATLVCLATGFYPDHVELSWWVNGKEVHSGVSTDPQPLKEQPALNDSRYALSSRLRVSATFWQDPRNHFRCQVQFYGLSENDEWTQDRAKPVTQIVSAEAWGRADASTKGPSVFPLAPSSKSTSGGTAALGCLVKDYFPEPVTVSWNSGALTSGVHTFPAVLQSSGLYSLSSVVTVPSSSLGTQTYICNVNHKPSNTKVDKKVGGGGSLTDREWAEEWKHLDHLLNCIMDMVEKTRRSLTVLRRCQEADREELNYWIRRYSDAEAPTSSSTKKTQLQLEHLLLDLQMILNGINNYKNPKLTRMLTFKFYMPKKATELKHLQCLEEELKPLEEVLNLAQSKNFHLRPRDLISNINVIVLELKGSETTFMCEYADETATIVEFLNRWITFCQSIISTLT

SEQ ID NO: 94 - protein, 412 aa, Artificial Sequence
  Synthetic
NAGVTQTPKFQVLKTGQSMTLQCAQDMNHEYMSWYRQDPGMGLRLIHYSVAIQTTDQGEVPNGYNVSRSTIEDFPLRLLSAAPSQTSVYFCASSYLGNTGELFFGEGSRLTVLEDLKNVFPPEVAVFEPSEAEISHTQKATLVCLATGFYPDHVELSWWVNGKEVHSGVSTDPQPLKEQPALNDSRYALSSRLRVSATFWQDPRNHFRCQVQFYGLSENDEWTQDRAKPVTQIVSAEAWGRADASTKGPSVFPLAPSSKSTSGGTAALGCLVKDYFPEPVTVSWNSGALTSGVHTFPAVLQSSGLYSLSSVVTVPSSSLGTQTYICNVNHKPSNTKVDKKVEPKSCDKTHTCPPCPLTDREWAEEWKHLDHLLNCIMDMVEKTRRSLTVLRRCQEADREELNYWIRRYSDAE

SEQ ID NO: 95 - protein, 417 aa, Artificial Sequence
  Synthetic
NAGVTQTPKFQVLKTGQSMTLQCAQDMNHEYMSWYRQDPGMGLRLIHYSVAIQTTDQGEVPNGYNVSRSTIEDFPLRLLSAAPSQTSVYFCASSYLGNTGELFFGEGSRLTVLEDLKNVFPPEVAVFEPSEAEISHTQKATLVCLATGFYPDHVELSWWVNGKEVHSGVSTDPQPLKEQPALNDSRYALSSRLRVSATFWQDPRNHFRCQVQFYGLSENDEWTQDRAKPVTQIVSAEAWGRADASTKGPSVFPLAPSSKSTSGGTAALGCLVKDYFPEPVTVSWNSGALTSGVHTFPAVLQSSGLYSLSSVVTVPSSSLGTQTYICNVNHKPSNTKVDKKVEPKSCDKTHTCPPCPGGGGSLTDREWAEEWKHLDHLLNCIMDMVEKTRRSLTVLRRCQEADREELNYWIRRYSDAE

SEQ ID NO: 96 - protein, 172 aa, Artificial Sequence
  Synthetic
QVQLVESGGALVQPGGSLRLSCAASGFPVNRYSMRWYRQAPGKEREWVAGMSSAGDRSSYEDSVKGRFTISRDDARNTVYLQMNSLKPEDTAVYYCNVNVGFEYWGQGTQVTVSSKLTDREWAEEWKHLDHLLNCIMDMVEKTRRSLTVLRRCQEADREELNYWIRRYSDAE

SEQ ID NO: 97 - protein, 177 aa, Artificial Sequence
  Synthetic
QVQLVESGGALVQPGGSLRLSCAASGFPVNRYSMRWYRQAPGKEREWVAGMSSAGDRSSYEDSVKGRFTISRDDARNTVYLQMNSLKPEDTAVYYCNVNVGFEYWGQGTQVTVSSKGGGGSLTDREWAEEWKHLDHLLNCIMDMVEKTRRSLTVLRRCQEADREELNYWIRRYSDAE

SEQ ID NO: 98 - protein, 305 aa, Artificial Sequence
  Synthetic
QVQLVESGGALVQPGGSLRLSCAASGFPVNRYSMRWYRQAPGKEREWVAGMSSAGDRSSYEDSVKGRFTISRDDARNTVYLQMNSLKPEDTAVYYCNVNVGFEYWGQGTQVTVSSKLTDREWAEEWKHLDHLLNCIMDMVEKTRRSLTVLRRCQEADREELNYWIRRYSDAEAPTSSSTKKTQLQLEHLLLDLQMILNGINNYKNPKLTRMLTFKFYMPKKATELKHLQCLEEELKPLEEVLNLAQSKNFHLRPRDLISNINVIVLELKGSETTFMCEYADETATIVEFLNRWITFCQSIISTLT

SEQ ID NO: 99 - protein, 310 aa, Artificial Sequence
  Synthetic
QVQLVESGGALVQPGGSLRLSCAASGFPVNRYSMRWYRQAPGKEREWVAGMSSAGDRSSYEDSVKGRFTISRDDARNTVYLQMNSLKPEDTAVYYCNVNVGFEYWGQGTQVTVSSKGGGGSLTDREWAEEWKHLDHLLNCIMDMVEKTRRSLTVLRRCQEADREELNYWIRRYSDAEAPTSSSTKKTQLQLEHLLLDLQMILNGINNYKNPKLTRMLTFKFYMPKKATELKHLQCLEEELKPLEEVLNLAQSKNFHLRPRDLISNINVIVLELKGSETTFMCEYADETATIVEFLNRWITFCQSIISTLT

SEQ ID NO: 100 - protein, 378 aa, Artificial Sequence
  Synthetic
KQEVTQIPAALSVPEGENLVLNCSFTDSAIYNLQWFRQDPGKGLTSLLLITPWQREQTSGRLNASLDKSSGRSTLYIAASQPGDSATYLCAVRPLLDGTYIPTFGRGTSLIVHPYIQNPDPAVYQLRDSKSSDKSVCLFTDFDSQTNVSQSKDSDVYITDKTVLDMRSMDFKSNSAVAWSNKSDFACANAFNNSIIPEDTFFPSPESSASTKGPSVFPLAPSSKSTSGGTAALGCLVKDYFPEPVTVSWNSGALTSGVHTFPAVLQSSGLYSLSSVVTVPSSSLGTQTYICNVNHKPSNTKVDKKVLHGTRQEEMIDHRLTDREWAEEWKHLDHLLNCIMDMVEKTRRSLTVLRRCQEADREELNYWIRRYSDAEDLK

SEQ ID NO: 101 - protein, 383 aa, Artificial Sequence
  Synthetic
KQEVTQIPAALSVPEGENLVLNCSFTDSAIYNLQWFRQDPGKGLTSLLLITPWQREQTSGRLNASLDKSSGRSTLYIAASQPGDSATYLCAVRPLLDGTYIPTFGRGTSLIVHPYIQNPDPAVYQLRDSKSSDKSVCLFTDFDSQTNVSQSKDSDVYITDKTVLDMRSMDFKSNSAVAWSNKSDFACANAFNNSIIPEDTFFPSPESSASTKGPSVFPLAPSSKSTSGGTAALGCLVKDYFPEPVTVSWNSGALTSGVHTFPAVLQSSGLYSLSSVVTVPSSSLGTQTYICNVNHKPSNTKVDKKVGGGGSLHGTRQEEMIDHRLTDREWAEEWKHLDHLLNCIMDMVEKTRRSLTVLRRCQEADREELNYWIRRYSDAEDLK

SEQ ID NO: 102 - protein, 349 aa, Artificial Sequence
  Synthetic
NAGVTQTPKFQVLKTGQSMTLQCAQDMNHEYMSWYRQDPGMGLRLIHYSVAIQTTDQGEVPNGYNVSRSTIEDFPLRLLSAAPSQTSVYFCASSYLGNTGELFFGEGSRLTVLEDLKNVFPPEVAVFEPSEAEISHTQKATLVCLATGFYPDHVELSWWVNGKEVHSGVSTDPQPLKEQPALNDSRYALSSRLRVSATFWQDPRNHFRCQVQFYGLSENDEWTQDRAKPVTQIVSAEAWGRADTVAAPSVFIFPPSDEQLKSGTASVVCLLNNFYPREAKVQWKVDNALQSGNSQESVTEQDSKDSTYSLSSTLTLSKADYEKHKVYACEVTHQGLSSPVTKSFNRGEC

SEQ ID NO: 103 - protein, 291 aa, Artificial Sequence
  Synthetic
EVQLVESGGGLVQPGRSLRLSCAASGFTFDDYAMHWVRQAPGKGLEWVSAITWNSGHIDYADSVEGRFTISRDNAKNSLYLQMNSLRAEDTAVYYCAKVSYLSTASSLDYWGQGTLVTVSSASTKGPSVFPLAPSSKSTSGGTAALGCLVKDYFPEPVTVSWNSGALTSGVHTFPAVLQSSGLYSLSSVVTVPSSSLGTQTYICNVNHKPSNTKVDKKVLHGTRQEEMIDHRLTDREWAEEWKHLDHLLNCIMDMVEKTRRSLTVLRRCQEADREELNYWIRRYSDAEDLK

SEQ ID NO: 104 - protein, 296 aa, Artificial Sequence
  Synthetic
EVQLVESGGGLVQPGRSLRLSCAASGFTFDDYAMHWVRQAPGKGLEWVSAITWNSGHIDYADSVEGRFTISRDNAKNSLYLQMNSLRAEDTAVYYCAKVSYLSTASSLDYWGQGTLVTVSSASTKGPSVFPLAPSSKSTSGGTAALGCLVKDYFPEPVTVSWNSGALTSGVHTFPAVLQSSGLYSLSSVVTVPSSSLGTQTYICNVNHKPSNTKVDKKVGGGGSLHGTRQEEMIDHRLTDREWAEEWKHLDHLLNCIMDMVEKTRRSLTVLRRCQEADREELNYWIRRYSDAEDLK

SEQ ID NO: 105 - protein, 214 aa, Artificial Sequence
  Synthetic
DIQMTQSPSSLSASVGDRVTITCRASQGIRNYLAWYQQKPGKAPKLLIYAASTLQSGVPSRFSGSGSGTDFTLTISSLQPEDVATYYCQRYNRAPYTFGQGTKVEIKRTVAAPSVFIFPPSDEQLKSGTASVVCLLNNFYPREAKVQWKVDNALQSGNSQESVTEQDSKDSTYSLSSTLTLSKADYEKHKVYACEVTHQGLSSPVTKSFNRGEC

SEQ ID NO: 106 - protein, 293 aa, Artificial Sequence
  Synthetic
EVQLVESGGGLVQPGGSLRLSCAASGYTFTNYGMNWVRQAPGKGLEWVGWINTYTGEPTYAADFKRRFTFSLDTSKSTAYLQMNSLRAEDTAVYYCAKYPHYYGSSHWYFDVWGQGTLVTVSSASTKGPSVFPLAPSSKSTSGGTAALGCLVKDYFPEPVTVSWNSGALTSGVHTFPAVLQSSGLYSLSSVVTVPSSSLGTQTYICNVNHKPSNTKVDKKVLHGTRQEEMIDHRLTDREWAEEWKHLDHLLNCIMDMVEKTRRSLTVLRRCQEADREELNYWIRRYSDAEDLK

SEQ ID NO: 107 - protein, 298 aa, Artificial Sequence
  Synthetic
EVQLVESGGGLVQPGGSLRLSCAASGYTFTNYGMNWVRQAPGKGLEWVGWINTYTGEPTYAADFKRRFTFSLDTSKSTAYLQMNSLRAEDTAVYYCAKYPHYYGSSHWYFDVWGQGTLVTVSSASTKGPSVFPLAPSSKSTSGGTAALGCLVKDYFPEPVTVSWNSGALTSGVHTFPAVLQSSGLYSLSSVVTVPSSSLGTQTYICNVNHKPSNTKVDKKVGGGGSLHGTRQEEMIDHRLTDREWAEEWKHLDHLLNCIMDMVEKTRRSLTVLRRCQEADREELNYWIRRYSDAEDLK

SEQ ID NO: 108 - protein, 214 aa, Artificial Sequence
  Synthetic
DIQMTQSPSSLSASVGDRVTITCSASQDISNYLNWYQQKPGKAPKVLIYFTSSLHSGVPSRFSGSGSGTDFTLTISSLQPEDFATYYCQQYSTVPWTFGQGTKVEIKRTVAAPSVFIFPPSDEQLKSGTASVVCLLNNFYPREAKVQWKVDNALQSGNSQESVTEQDSKDSTYSLSSTLTLSKADYEKHKVYACEVTHQGLSSPVTKSFNRGEC

SEQ ID NO: 109 - protein, 185 aa, Artificial Sequence
  Synthetic
DIQMTQSPSSLSASVGDRVTITCRASQSIDSYLHWYQQKPGKAPKLLIYSASELQSGVPSRFSGSGSGTDFTLTISSLQPEDFATYYCQQVVWRPFTFGQGTKVEIKRGGGGSLHGTRQEEMIDHRLTDREWAEEWKHLDHLLNCIMDMVEKTRRSLTVLRRCQEADREELNYWIRRYSDAEDLK

SEQ ID NO: 110 - protein, 196 aa, Artificial Sequence
  Synthetic
EVQLLESGGGLVQPGGSLRLSCAASGFTFAHETMVWVRQAPGKGLEWVSHIPPDGQDPFYADSVKGRFTISRDNSKNTLYLQMNSLRAEDTAVYHCALLPKRGPWFDYWGQGTLVTVSSGGGGSLHGTRQEEMIDHRLTDREWAEEWKHLDHLLNCIMDMVEKTRRSLTVLRRCQEADREELNYWIRRYSDAEDLK

SEQ ID NO: 111 - protein, 184 aa, Artificial Sequence
  Synthetic
DIQMTQSPSSLSASVGDRVTITCRASQWIGPELSWYQQKPGKAPKLLIYHTSILQSGVPSRFSGSGSGTDFTLTISSLQPEDFATYYCQQYMFQPRTFGQGTKVEIRGGGGSLHGTRQEEMIDHRLTDREWAEEWKHLDHLLNCIMDMVEKTRRSLTVLRRCQEADREELNYWIRRYSDAEDLK

SEQ ID NO: 112 - protein, 185 aa, Artificial Sequence
  Synthetic
DIQMTQSPTSLSASVGDRVTITCRASQWIGNLLDWYQQKPGEAPKLLIYYASFLQSGVPSRFSGGGFGTDFTLTISSLQPEDFATYYCQQANPAPLTFGQGTKVEIKRGGGGSLHGTRQEEMIDHRLTDREWAEEWKHLDHLLNCIMDMVEKTRRSLTVLRRCQEADREELNYWIRRYSDAEDLK

SEQ ID NO: 113 - protein, 297 aa, Artificial Sequence
  Synthetic
DIQMTQSPSSLSASVGDRVTITCRASQWIGPELSWYQQKPGKAPKLLIYHTSILQSGVPSRFSGSGSGTDFTLTISSLQPEDFATYYCQQYMFQPRTFGQGTKVEIRGGGGSLHGTRQEEMIDHRLTDREWAEEWKHLDHLLNCIMDMVEKTRRSLTVLRRCQEADREELNYWIRRYSDAEDLKGGGGSDIQMTQSPTSLSASVGDRVTITCRASQWIGNLLDWYQQKPGEAPKLLIYYASFLQSGVPSRFSGGGFGTDFTLTISSLQPEDFATYYCQQANPAPLTFGQGTKVEIKR

SEQ ID NO: 114 - protein, 185 aa, Artificial Sequence
  Synthetic
DIQMTQSPSSLSASVGDRVTITCRASQNIDSRLSWYQQKPGKAPKLLIYRTSVLQSGVPSRFSGSGSGTDFTLTISSLQPEDFATYYCQQWDMFPLTFGQGTKVEIKRGGGGSLHGTRQEEMIDHRLTDREWAEEWKHLDHLLNCIMDMVEKTRRSLTVLRRCQEADREELNYWIRRYSDAEDLK

SEQ ID NO: 115 - protein, 298 aa, Artificial Sequence
  Synthetic
DIQMTQSPSSLSASVGDRVTITCRASQNIDSRLSWYQQKPGKAPKLLIYRTSVLQSGVPSRFSGSGSGTDFTLTISSLQPEDFATYYCQQWDMFPLTFGQGTKVEIKRGGGGSLHGTRQEEMIDHRLTDREWAEEWKHLDHLLNCIMDMVEKTRRSLTVLRRCQEADREELNYWIRRYSDAEDLKGGGGSDIQMTQSPSSLSASVGDRVTITCRASQDIGDRLRWYQQKPGKAPKLLIYHGSRLESGVPSRFSGSRSGTDFTLTISSLQPEDFATYYCQQQWFRPYTFGQGTKVEIKR

SEQ ID NO: 116 - DNA, 168 bp, Artificial Sequence
  Synthetic
ctaacagacagagaatgggcagaagagtggaaacatcttgaccatctgttaaactgcataatggacatggtagaaaaaacaaggcgatctctcaccgtactaaggcggtgtcaagaagcagaccgggaagaattgaattactggatccggcggtacagtgacgccgag

SEQ ID NO: 117 - DNA, 207 bp, Artificial Sequence
  Synthetic
ttgcatggcacacgtcaagaagaaatgattgatcacagactaacagacagagaatgggcagaagagtggaaacatcttgaccatctgttaaactgcataatggacatggtagaaaaaacaaggcgatctctcaccgtactaaggcggtgtcaagaagcagaccgggaagaattgaattactggatccggcggtacagtgacgccgag

SEQ ID NO: 118 - DNA, 201 bp, Artificial Sequence
  Synthetic
ggcacacgtcaagaagaaatgattgatcacagactaacagacagagaatgggcagaagagtggaaacatcttgaccatctgttaaactgcataatggacatggtagaaaaaacaaggcgatctctcaccgtactaaggcggtgtcaagaagcagaccgggaagaattgaattactggatccggcggtacagtgacgccgag

SEQ ID NO: 119 - DNA, 141 bp, Artificial Sequence
  Synthetic
caagaagaaatgattgatcacagactaacagacagagaatgggcagaagagtggaaacatcttgaccatctgttaaactgcataatggacatggtagaaaaaacaaggcgatctctcaccgtactaaggcggtgtcaagaa

SEQ ID NO: 120 - protein, 56 aa, Artificial Sequence
  Synthetic
LTDREWAEEWKHLDHLLNCIMDMVEKTRRSLTVLRRCQEADREELNYWIRRYSDAE

SEQ ID NO: 121 - protein, 72 aa, Artificial Sequence
  Synthetic
LHGTRQEEMIDHRLTDREWAEEWKHLDHLLNCIMDMVEKTRRSLTVLRRCQEADREELNYWIRRYSDAEDLK

SEQ ID NO: 122 - protein, 67 aa, Artificial Sequence
  Synthetic
GTRQEEMIDHRLTDREWAEEWKHLDHLLNCIMDMVEKTRRSLTVLRRCQEADREELNYWIRRYSDAE

SEQ ID NO: 123 - protein, 47 aa, Artificial Sequence
  Synthetic
QEEMIDHRLTDREWAEEWKHLDHLLNCIMDMVEKTRRSLTVLRRCQE

SEQ ID NO: 124 - DNA, 126 bp, Artificial Sequence
  Synthetic
aagaagaaaccactggatggagaatatttcacccttcagatccgtgggcgtgagcgcttcgagatgttccgagagctgaatgaggccttggaactcaaggatgcccaggctgggaaggagccaggg

SEQ ID NO: 125 - DNA, 96 bp, Artificial Sequence
  Synthetic
ggagaatatttcacccttcagatccgtgggcgtgagcgcttcgagatgttccgagagctgaatgaggccttggaactcaaggatgcccaggctggg

SEQ ID NO: 126 - protein, 42 aa, Artificial Sequence
  Synthetic
KKKPLDGEYFTLQIRGRERFEMFRELNEALELKDAQAGKEPG

SEQ ID NO: 127 - DNA, 593 bp, Artificial Sequence
  Synthetic
cacgtgatggagctggggctgagctgggtggtcctggctgctctactacaaggtgtccaggctcaggttcagctggttgaaagcggtggtgcactggttcagcctggtggtagcctgcgtctgagctgtgcagcaagcggttttccggttaatcgttatagcatgcgttggtatcgtcaggcaccgggtaaagaacgtgaatgggttgcaggtatgagcagtgccggtgatcgtagcagctatgaagatagcgttaaaggtcgttttaccatcagccgtgatgatgcacgtaataccgtttatctgcaaatgaatagcctgaaaccggaagataccgcagtgtattattgcaatgttaacgtgggctttgaatattggggtcagggcacccaggttaccgttagcagcaaaaagaagaaaccactggatggagaatatttcacccttcagatccgtgggcgtgagcgcttcgagatgttccgagagctgaatgaggccttggaactcaaggatgcccaggctgggaaggagccaggggactacaaggacgacgacgacaagcaccaccaccatcaccactgataagcggccgc

SEQ ID NO: 128 - protein, 197 aa, Artificial Sequence
  Synthetic
  VARIANT (194)..(195): Xaa = any amino acid
HVMELGLSWVVLAALLQGVQAQVQLVESGGALVQPGGSLRLSCAASGFPVNRYSMRWYRQAPGKEREWVAGMSSAGDRSSYEDSVKGRFTISRDDARNTVYLQMNSLKPEDTAVYYCNVNVGFEYWGQGTQVTVSSKKKKPLDGEYFTLQIRGRERFEMFRELNEALELKDAQAGKEPGDYKDDDDKHHHHHHXXAA

SEQ ID NO: 129 - DNA, 608 bp, Artificial Sequence
  Synthetic
cacgtgatggagctggggctgagctgggtggtcctggctgctctactacaaggtgtccaggctcaggttcagctggttgaaagcggtggtgcactggttcagcctggtggtagcctgcgtctgagctgtgcagcaagcggttttccggttaatcgttatagcatgcgttggtatcgtcaggcaccgggtaaagaacgtgaatgggttgcaggtatgagcagtgccggtgatcgtagcagctatgaagatagcgttaaaggtcgttttaccatcagccgtgatgatgcacgtaataccgtttatctgcaaatgaatagcctgaaaccggaagataccgcagtgtattattgcaatgttaacgtgggctttgaatattggggtcagggcacccaggttaccgttagcagcaaaggaggaggtgggagcaagaagaaaccactggatggagaatatttcacccttcagatccgtgggcgtgagcgcttcgagatgttccgagagctgaatgaggccttggaactcaaggatgcccaggctgggaaggagccaggggactacaaggacgacgacgacaagcaccaccaccatcaccactgataagcggccgc

SEQ ID NO: 130 - protein, 202 aa, Artificial Sequence
  Synthetic
  VARIANT (199)..(200): Xaa = any amino acid
HVMELGLSWVVLAALLQGVQAQVQLVESGGALVQPGGSLRLSCAASGFPVNRYSMRWYRQAPGKEREWVAGMSSAGDRSSYEDSVKGRFTISRDDARNTVYLQMNSLKPEDTAVYYCNVNVGFEYWGQGTQVTVSSKGGGGSKKKPLDGEYFTLQIRGRERFEMFRELNEALELKDAQAGKEPGDYKDDDDKHHHHHHXXAA

SEQ ID NO: 131 - protein, 334 aa, Artificial Sequence
  Synthetic
MGWSCIILFLVATATGVHSKQEVTQIPAALSVPEGENLVLNCSFTDSAIYNLQWFRQDPGKGLTSLLLITPWQREQTSGRLNASLDKSSGRSTLYIAASQPGDSATYLCAVRPLLDGTYIPTFGRGTSLIVHPYIQNPDPAVYQLRDSKSSDKSVCLFTDFDSQTNVSQSKDSDVYITDKTVLDMRSMDFKSNSAVAWSNKSDFACANAFNNSIIPEDTFFPSPESSRTVAAPSVFIFPPSDEQLKSGTASVVCLLNNFYPREAKVQWKVDNALQSGNSQESVTEQDSKDSTYSLSSTLTLSKADYEKHKVYACEVTHQGLSSPVTKSFNRGEC

SEQ ID NO: 132 - protein, 441 aa, Artificial Sequence
  Synthetic
MGWSCIILFLVATATGVHSNAGVTQTPKFQVLKTGQSMTLQCAQDMNHEYMSWYRQDPGMGLRLIHYSVAIQTDQGEVPNGYNVSRSTIEDFPLRLLSAAPSQTSVYFCASSYLGNTGELFFGEGSRLTVLEDLNKVFPPEVAVFEPSEAEISHTQKATLVCLATGFFPDHVELSWWVNGKEVHSGVSTDPQPLKEQPALNDSRYALSSRLRVSATFWQDPRNHFRCQVQFYGLSENDEWTQDRAKPVTQIVSAEAWGRADASTKGPSVFPLAPSSKSTSGGTAALGCLVKDYFPEPVTVSWNSGALTSGVHTFPAVLQSSGLYSLSSVVTVPSSSLGTQTYICNVNHKPSNTKVDKKVGGGGSGGGGSGGGGSGGGGSLTDREWAEEWKHLDHLLNCIMDMVEKTRRSLTVLRRCQEADREELNYWIRRYSDAEHHHHHH

SEQ ID NO: 133 - protein, 334 aa, Artificial Sequence; identical to SEQ ID NO: 131
  Synthetic

SEQ ID NO: 134 - protein, 456 aa, Artificial Sequence
  Synthetic
MGWSCIILFLVATATGVHSNAGVTQTPKFQVLKTGQSMTLQCAQDMNHEYMSWYRQDPGMGLRLIHYSVAIQTDQGEVPNGYNVSRSTIEDFPLRLLSAAPSQTSVYFCASSYLGNTGELFFGEGSRLTVLEDLNKVFPPEVAVFEPSEAEISHTQKATLVCLATGFFPDHVELSWWVNGKEVHSGVSTDPQPLKEQPALNDSRYALSSRLRVSATFWQDPRNHFRCQVQFYGLSENDEWTQDRAKPVTQIVSAEAWGRADASTKGPSVFPLAPSSKSTSGGTAALGCLVKDYFPEPVTVSWNSGALTSGVHTFPAVLQSSGLYSLSSVVTVPSSSLGTQTYICNVNHKPSNTKVDKKVEPKSCDKTHTCPPCPGGGGSGGGGSGGGGSGGGGSLTDREWAEEWKHLDHLLNCIMDMVEKTRRSLTVLRRCQEADREELNYWIRRYSDAEHHHHHH

SEQ ID NO: 135 - protein, 334 aa, Artificial Sequence; identical to SEQ ID NO: 131
  Synthetic

SEQ ID NO: 136 - protein, 594 aa, Artificial Sequence
  Synthetic
MGWSCIILFLVATATGVHSNAGVTQTPKFQVLKTGQSMTLQCAQDMNHEYMSWYRQDPGMGLRLIHYSVAIQTDQGEVPNGYNVSRSTIEDFPLRLLSAAPSQTSVYFCASSYLGNTGELFFGEGSRLTVLEDLNKVFPPEVAVFEPSEAEISHTQKATLVCLATGFFPDHVELSWWVNGKEVHSGVSTDPQPLKEQPALNDSRYALSSRLRVSATFWQDPRNHFRCQVQFYGLSENDEWTQDRAKPVTQIVSAEAWGRADASTKGPSVFPLAPSSKSTSGGTAALGCLVKDYFPEPVTVSWNSGALTSGVHTFPAVLQSSGLYSLSSVVTVPSSSLGTQTYICNVNHKPSNTKVDKKVGGGGSGGGGSGGGGSGGGGSLTDREWAEEWKHLDHLLNCIMDMVEKTRRSLTVLRRCQEADREELNYWIRRYSDAEGGGGSGGGGSGGGGSGGGGSAPTSSSTKKTQLQLEHLLLDLQMILNGINNYKNPKLTRMLTFKFYMPKKATELKHLQCLEEELKPLEEVLNLAQSKNFHLRPRDLISNINVIVLELKGSETTFMCEYADETATIVEFLNRWITFCQSIISTLTHHHHHH

SEQ ID NO: 137 - protein, 334 aa, Artificial Sequence; identical to SEQ ID NO: 131
  Synthetic

SEQ ID NO: 138 - protein, 609 aa, Artificial Sequence
  Synthetic
MGWSCIILFLVATATGVHSNAGVTQTPKFQVLKTGQSMTLQCAQDMNHEYMSWYRQDPGMGLRLIHYSVAIQTDQGEVPNGYNVSRSTIEDFPLRLLSAAPSQTSVYFCASSYLGNTGELFFGEGSRLTVLEDLNKVFPPEVAVFEPSEAEISHTQKATLVCLATGFFPDHVELSWWVNGKEVHSGVSTDPQPLKEQPALNDSRYALSSRLRVSATFWQDPRNHFRCQVQFYGLSENDEWTQDRAKPVTQIVSAEAWGRADASTKGPSVFPLAPSSKSTSGGTAALGCLVKDYFPEPVTVSWNSGALTSGVHTFPAVLQSSGLYSLSSVVTVPSSSLGTQTYICNVNHKPSNTKVDKKVEPKSCDKTHTCPPCPGGGGSGGGGSGGGGSGGGGSLTDREWAEEWKHLDHLLNCIMDMVEKTRRSLTVLRRCQEADREELNYWIRRYSDAEGGGGSGGGGSGGGGSGGGGSAPTSSSTKKTQLQLEHLLLDLQMILNGINNYKNPKLTRMLTFKFYMPKKATELKHLQCLEEELKPLEEVLNLAQSKNFHLRPRDLISNINVIVLELKGSETTFMCEYADETATIVEFLNRWITFCQSIISTLTHHHHHH

SEQ ID NO: 139 - DNA, 912 bp, Artificial Sequence
  Synthetic
atgggatggtcttgtataattctgttcctggtggcaacagcaacaggagtgcatagcgaggtgcagctggtggagtctgggggaggcttggtacagcccggcaggtccctgagactctcctgtgcggcctctggattcacctttgatgattatgccatgcactgggtccggcaagctccagggaagggcctggaatgggtctcagctatcacttggaatagtggtcacatagactatgcggactctgtggagggccgattcaccatctccagagacaacgccaagaactccctgtatctgcaaatgaacagtctgagagctgaggatacggccgtatattactgtgcgaaagtctcgtaccttagcaccgcgtcctcccttgactattggggccaaggtaccctggtcaccgtctcgagtggcggcggaggcagcggaggcggaggttctggaggaggggggagtgacatccagatgacccagtctccatcctccctgtctgcatctgtaggggacagagtcaccatcacttgtcgggcaagtcagggcatcagaaattacttagcctggtatcagcaaaaaccagggaaagcccctaagctcctgatctatgctgcatccactttgcaatcaggggtcccatctcggttcagtggcagtggatctgggacagatttcactctcaccatcagcagcctacagcctgaagatgttgcaacttattactgtcaaaggtataaccgtgcaccgtatacttttggccaggggaccaaggtggaaatcaaaaagaagaaaccactggatggagaatatttcacccttcagatccgtgggcgtgagcgcttcgagatgttccgagagctgaatgaggccttggaactcaaggatgcccaggctgggaaggagccaggg

SEQ ID NO: 140 - DNA, 801 bp, Artificial Sequence
  Synthetic
atgggctggtcctgcatcatcctgtttctggtggccacagccacaggcgtgcacagcgatattgtgctgacacagagccccgccatcctgagtgcttctccaggcgagaaagtgaccatgacctgcagagccagcagcagcgtgaactacatggactggtatcagaagaagcccggcagcagccccaagccttggatctacgccacaagcaatctggccagcggagtgcctgccagattttctggctctggcagcggcacaagctacagcctgacaatcagcagagtggaagccgaggatgccgccacctactactgtcagcagtggtccttcaatcctcctaccttcggcggaggcaccaagctggaaatcaagggctctacatctggcggaggtggaagcggaggcggaggatctggtggtggtggatcttctgaggtccagctgcaacagtctggcgccgagcttgtgaaacctggcgcctctgtgaagatgagctgcaaggccagcggctacaccttcaccagctacaacatgcactgggtcaagcagacccctggacagggactcgagtggatcggagccatctatcccggcaatggcgacacctcctacaaccagaagttcaagggcaaagccacactgaccgccgacaagagcagcagcacagcctacatgcagctgagcagcctgaccagcgaggacagcgccgattactactgcgccagaagcaactactacggcagctcctactggttcttcgacgtgtggggagccggcaccacagtgacagtgtccagc

SEQ ID NO: 141 - DNA, 927 bp, Artificial Sequence
  Synthetic
atgggctggtcctgcatcatcctgtttctggtggccacagccacaggcgtgcacagcgatattgtgctgacacagagccccgccatcctgagtgcttctccaggcgagaaagtgaccatgacctgcagagccagcagcagcgtgaactacatggactggtatcagaagaagcccggcagcagccccaagccttggatctacgccacaagcaatctggccagcggagtgcctgccagattttctggctctggcagcggcacaagctacagcctgacaatcagcagagtggaagccgaggatgccgccacctactactgtcagcagtggtccttcaatcctcctaccttcggcggaggcaccaagctggaaatcaagggctctacatctggcggaggtggaagcggaggcggaggatctggtggtggtggatcttctgaggtccagctgcaacagtctggcgccgagcttgtgaaacctggcgcctctgtgaagatgagctgcaaggccagcggctacaccttcaccagctacaacatgcactgggtcaagcagacccctggacagggactcgagtggatcggagccatctatcccggcaatggcgacacctcctacaaccagaagttcaagggcaaagccacactgaccgccgacaagagcagcagcacagcctacatgcagctgagcagcctgaccagcgaggacagcgccgattactactgcgccagaagcaactactacggcagctcctactggttcttcgacgtgtggggagccggcaccacagtgacagtgtccagcaagaaaaagcccctggacggcgagtacttcacactgcagatccggggcagagaacgcttcgagatgttcagagagctgaacgaggccctggaactgaaggatgcccaggccggaaaagagcccggc

SEQ ID NO: 142 - DNA, 1671 bp, Artificial Sequence
  Synthetic
atgggctggtcctgcatcatcctgtttctggtggccacagccacaggcgtgcacagcgatattgtgctgacacagagccccgccatcctgagtgcttctccaggcgagaaagtgaccatgacctgcagagccagcagcagcgtgaactacatggactggtatcagaagaagcccggcagcagccccaagccttggatctacgccacaagcaatctggccagcggagtgcctgccagattttctggctctggcagcggcacaagctacagcctgacaatcagcagagtggaagccgaggatgccgccacctactactgtcagcagtggtccttcaatcctcctaccttcggcggaggcaccaagctggaaatcaagggctctacatctggcggaggtggaagcggaggcggaggatctggtggtggtggatcttctgaggtccagctgcaacagtctggcgccgagcttgtgaaacctggcgcctctgtgaagatgagctgcaaggccagcggctacaccttcaccagctacaacatgcactgggtcaagcagacccctggacagggactcgagtggatcggagccatctatcccggcaatggcgacacctcctacaaccagaagttcaagggcaaagccacactgaccgccgacaagagcagcagcacagcctacatgcagctgagcagcctgaccagcgaggacagcgccgattactactgcgccagaagcaactactacggcagctcctactggttcttcgacgtgtggggagccggcaccacagtgacagtgtccagcaagaaaaagcccctggacggcgagtacttcacactgcagatccggggcagagaacgcttcgagatgttcagagagctgaacgaggccctggaactgaaggatgcccaggccggaaaagagcccggcgatattgtgctgacacagagccccgccatcctgagtgcttctccaggcgagaaagtgaccatgacctgcagagccagcagcagcgtgaactacatggactggtatcagaagaagcccggcagcagccccaagccttggatctacgccacaagcaatctggccagcggagtgcctgccagattttctggctctggcagcggcacaagctacagcctgacaatcagcagagtggaagccgaggatgccgccacctactactgtcagcagtggtccttcaatcctcctaccttcggcggaggcaccaagctggaaatcaagggctctacatctggcggaggtggaagcggaggcggaggatctggtggtggtggatcttctgaggtccagctgcaacagtctggcgccgagcttgtgaaacctggcgcctctgtgaagatgagctgcaaggccagcggctacaccttcaccagctacaacatgcactgggtcaagcagacccctggacagggactcgagtggatcggagccatctatcccggcaatggcgacacctcctacaaccagaagttcaagggcaaagccacactgaccgccgacaagagcagcagcacagcctacatgcagctgagcagcctgaccagcgaggacagcgccgattactactgcgccagaagcaactactacggcagctcctactggttcttcgacgtgtggggagccggcaccacagtgacagtgtccagc

SEQ ID NO: 143 - DNA, 870 bp, Artificial Sequence
  Synthetic
atgggatggtcttgtataattctgttcctggtggcaacagcaacaggagtgcatagcgaggtgcagctggttgaatctggcggaggactggttcagcctggcggatctctgagactgtcttgtgccgccagcggcttcaccttcagcgactactggatgtactgggtccgacaggcccctggcaaaggccttgaatgggtgtccgagatcaacaccaacggcctgatcacaaagtaccccgacagcgtgaagggcagattcaccatcagccgggacaacgccaagaacaccctgtacctgcagatgaacagcctgcggcctgaggataccgccgtgtactactgtgccagatctcccagcggattcaacagaggccagggcacactggtcaccgtgtcatctaagaagaaaccactggatggagaatatttcacccttcagatccgtgggcgtgagcgcttcgagatgttccgagagctgaatgaggccttggaactcaaggatgcccaggctgggaaggagccaggggaggtgcagctggttgaatctggcggaggactggttcaggctggcggatctctgagactgtcttgtgccgccagcggcagcagcttcagattcagagctatggcctggtacagacaggcccctgagaagcagagggatttcgtggccaccatcaacagcctgggcgagacaacatatgccaccgccgtggaaggccggttcaccatcagcagagacaacgccaagaacaccgtgtacctgcagatggacagcctgaagcctgaggataccgccgtgtactactgcaacgagcccagaggcaattactggggccagggcacacaagtgaccgtgtcatctcac

SEQ ID NO: 144 - DNA, 1653 bp, Artificial Sequence
  Synthetic
atgggatggtcttgtataattctgttcctggtggcaacagcaacaggagtgcatagcgaggtgcagctggtggagtctgggggaggcttggtacagcccggcaggtccctgagactctcctgtgcggcctctggattcacctttgatgattatgccatgcactgggtccggcaagctccagggaagggcctggaatgggtctcagctatcacttggaatagtggtcacatagactatgcggactctgtggagggccgattcaccatctccagagacaacgccaagaactccctgtatctgcaaatgaacagtctgagagctgaggatacggccgtatattactgtgcgaaagtctcgtaccttagcaccgcgtcctcccttgactattggggccaaggtaccctggtcaccgtctcgagtggcggcggaggcagcggaggcggaggttctggaggaggggggagtgacatccagatgacccagtctccatcctccctgtctgcatctgtaggggacagagtcaccatcacttgtcgggcaagtcagggcatcagaaattacttagcctggtatcagcaaaaaccagggaaagcccctaagctcctgatctatgctgcatccactttgcaatcaggggtcccatctcggttcagtggcagtggatctgggacagatttcactctcaccatcagcagcctacagcctgaagatgttgcaacttattactgtcaaaggtataaccgtgcaccgtatacttttggccaggggaccaaggtggaaatcaaaaagaagaaaccactggatggagaatatttcacccttcagatccgtgggcgtgagcgcttcgagatgttccgagagctgaatgaggccttggaactcaaggatgcccaggctgggaaggagccagggcaggttcagctggttcagtctggcgccgaagtgaagaaacctggcagcagcgtgaaggtgtcctgcaaggccagcggctacagcttcaccgactaccacatccactgggtccgacaggctccaggacaaggcttggaatggatgggcgtgatcaaccctatgtacggcaccaccgattacaaccagcggttcaagggcagagtgaccatcaccgccgatgagagcacaagcaccgcctacatggaactgagcagcctgagaagcgaggacaccgccgtgtactactgcgccagatacgactactttaccggcaccggggtgtactggggacagggaacactggtcacagtgtcctctggcggcggaggcagcggaggcggaggttctggaggaggggggagtgacatcgtgatgacccagacacctctgagcctgagcgtgacacctggacagcctgccagcatcagctgcagatccagcagatctctggtgcacagccggggcaatacctacctgcactggtatctgcagaagcccggccagtctcctcagctgctgatctacaaggtgtccaaccggttcatcggcgtgcccgatagattttctggcagcggctctggcaccgacttcaccctgaagatctccagagtggaagccgaggacgtgggcgtgtactactgtagccagagcacccatctgcctttcacctttggccagggcaccaagctggaaatcaagcac

SEQ ID NO: 145 - DNA, 1254 bp, Artificial Sequence
  Synthetic
atgggatggtcttgtataattctgttcctggtggcaacagcaacaggagtgcatagcgaggtgcagctggtggagtctgggggaggcttggtacagcccggcaggtccctgagactctcctgtgcggcctctggattcacctttgatgattatgccatgcactgggtccggcaagctccagggaagggcctggaatgggtctcagctatcacttggaatagtggtcacatagactatgcggactctgtggagggccgattcaccatctccagagacaacgccaagaactccctgtatctgcaaatgaacagtctgagagctgaggatacggccgtatattactgtgcgaaagtctcgtaccttagcaccgcgtcctcccttgactattggggccaaggtaccctggtcaccgtctcgagtggcggcggaggcagcggaggcggaggttctggaggaggggggagtgacatccagatgacccagtctccatcctccctgtctgcatctgtaggggacagagtcaccatcacttgtcgggcaagtcagggcatcagaaattacttagcctggtatcagcaaaaaccagggaaagcccctaagctcctgatctatgctgcatccactttgcaatcaggggtcccatctcggttcagtggcagtggatctgggacagatttcactctcaccatcagcagcctacagcctgaagatgttgcaacttattactgtcaaaggtataaccgtgcaccgtatacttttggccaggggaccaaggtggaaatcaaaaagaagaaaccactggatggagaatatttcacccttcagatccgtgggcgtgagcgcttcgagatgttccgagagctgaatgaggccttggaactcaaggatgcccaggctgggaaggagccaggggaggtgcagctggttgaatctggcggaggactggttcaggctggcggatctctgagactgtcttgtgccgccagcggcagcagcttcagattcagagctatggcctggtacagacaggcccctgagaagcagagggatttcgtggccaccatcaacagcctgggcgagacaacatatgccaccgccgtggaaggccggttcaccatcagcagagacaacgccaagaacaccgtgtacctgcagatggacagcctgaagcctgaggataccgccgtgtactactgcaacgagcccagaggcaattactggggccagggcacacaagtgaccgtgtcatctcac

SEQ ID NO: 146 - DNA, 525 bp, Artificial Sequence
  Synthetic
atgggatggtcttgtataattctgttcctggtggcaacagcaacaggagtgcatagcgaggtgcagctggttgaatctggcggaggactggttcaggctggcggatctctgagactgtcttgtgccgccagcggcagcagcttcagattcagagctatggcctggtacagacaggcccctgagaagcagagggatttcgtggccaccatcaacagcctgggcgagacaacatatgccaccgccgtggaaggccggttcaccatcagcagagacaacgccaagaacaccgtgtacctgcagatggacagcctgaagcctgaggataccgccgtgtactactgcaacgagcccagaggcaattactggggccagggcacacaagtgaccgtgtcatctaagaagaaaccactggatggagaatatttcacccttcagatccgtgggcgtgagcgcttcgagatgttccgagagctgaatgaggccttggaactcaaggatgcccaggctgggaaggagccagggcac

SEQ ID NO: 147 - DNA, 960 bp, Artificial Sequence
  Synthetic
atgggatggtcttgtataattctgttcctggtggcaacagcaacaggagtgcatagcgaggtgcagctggtggagtctgggggaggcttggtacagcccggcaggtccctgagactctcctgtgcggcctctggattcacctttgatgattatgccatgcactgggtccggcaagctccagggaagggcctggaatgggtctcagctatcacttggaatagtggtcacatagactatgcggactctgtggagggccgattcaccatctccagagacaacgccaagaactccctgtatctgcaaatgaacagtctgagagctgaggatacggccgtatattactgtgcgaaagtctcgtaccttagcaccgcgtcctcccttgactattggggccaaggtaccctggtcaccgtctcgagtggcggcggaggcagcggaggcggaggttctggaggaggggggagtgacatccagatgacccagtctccatcctccctgtctgcatctgtaggggacagagtcaccatcacttgtcgggcaagtcagggcatcagaaattacttagcctggtatcagcaaaaaccagggaaagcccctaagctcctgatctatgctgcatccactttgcaatcaggggtcccatctcggttcagtggcagtggatctgggacagatttcactctcaccatcagcagcctacagcctgaagatgttgcaacttattactgtcaaaggtataaccgtgcaccgtatacttttggccaggggaccaaggtggaaatcaaaggtggtggtggctccggaggcggcggctctggtggcggtggcagcaagaagaaaccactggatggagaatatttcacccttcagatccgtgggcgtgagcgcttcgagatgttccgagagctgaatgaggccttggaactcaaggatgcccaggctgggaaggagccagggcac

SEQ ID NO: 148 - DNA, 1623 bp, Artificial Sequence
  Synthetic
atgggctggtcctgcatcatcctgtttctggtggccacagccacaggcgtgcacagcgatattgtgctgacacagagccccgccatcctgagtgcttctccaggcgagaaagtgaccatgacctgcagagccagcagcagcgtgaactacatggactggtatcagaagaagcccggcagcagccccaagccttggatctacgccacaagcaatctggccagcggagtgcctgccagattttctggctctggcagcggcacaagctacagcctgacaatcagcagagtggaagccgaggatgccgccacctactactgtcagcagtggtccttcaatcctcctaccttcggcggaggcaccaagctggaaatcaagggctctacatctggcggaggtggaagcggaggcggaggatctggtggtggtggatcttctgaggtccagctgcaacagtctggcgccgagcttgtgaaacctggcgcctctgtgaagatgagctgcaaggccagcggctacaccttcaccagctacaacatgcactgggtcaagcagacccctggacagggactcgagtggatcggagccatctatcccggcaatggcgacacctcctacaaccagaagttcaagggcaaagccacactgaccgccgacaagagcagcagcacagcctacatgcagctgagcagcctgaccagcgaggacagcgccgattactactgcgccagaagcaactactacggcagctcctactggttcttcgacgtgtggggagccggcaccacagtgacagtgtccagcggcggaggtggaagcggaggcggaggatctggtggtggtggatctgcccctgaactgctgggcggaccttccgtgttcctgttccccccaaagcccaaggacaccctgatgatctcccggacccccgaagtgacctgcgtggtggtggatgtgtcccacgaggaccctgaagtgaagttcaattggtacgtggacggcgtggaagtgcacaacgccaagaccaagcctagagaggaacagtacaactccacctaccgggtggtgtccgtgctgaccgtgctgcaccaggattggctgaacggcaaagagtacaagtgcaaggtgtccaacaaggccctgcctgcccccatcgaaaagaccatctccaaggccaagggccagccccgggaaccccaggtgtacacactgccccctagcagggacgagctgaccaagaaccaggtgtccctgacctgtctcgtgaaaggcttctacccctccgatatcgccgtggaatgggagtccaacggccagcctgagaacaactacaagaccaccccccctgtgctggactccgacggctcattcttcctgtacagcaagctgacagtggacaagtcccggtggcagcagggcaacgtgttctcctgctccgtgatgcacgaggccctgcacaaccactacacccagaagtccctgtccctgagccccggcaagaagaaaaagcccctggacggcgagtacttcacactgcagatccggggcagagaacgcttcgagatgttcagagagctgaacgaggccctggaactgaaggatgcccaggccggaaaagagcccggc

SEQ ID NO: 149 - DNA, 1578 bp, Artificial Sequence
  Synthetic
atgggctggtcctgcatcatcctgtttctggtggccacagccacaggcgtgcacagcgatattgtgctgacacagagccccgccatcctgagtgcttctccaggcgagaaagtgaccatgacctgcagagccagcagcagcgtgaactacatggactggtatcagaagaagcccggcagcagccccaagccttggatctacgccacaagcaatctggccagcggagtgcctgccagattttctggctctggcagcggcacaagctacagcctgacaatcagcagagtggaagccgaggatgccgccacctactactgtcagcagtggtccttcaatcctcctaccttcggcggaggcaccaagctggaaatcaagggctctacatctggcggaggtggaagcggaggcggaggatctggtggtggtggatcttctgaggtccagctgcaacagtctggcgccgagcttgtgaaacctggcgcctctgtgaagatgagctgcaaggccagcggctacaccttcaccagctacaacatgcactgggtcaagcagacccctggacagggactcgagtggatcggagccatctatcccggcaatggcgacacctcctacaaccagaagttcaagggcaaagccacactgaccgccgacaagagcagcagcacagcctacatgcagctgagcagcctgaccagcgaggacagcgccgattactactgcgccagaagcaactactacggcagctcctactggttcttcgacgtgtggggagccggcaccacagtgacagtgtccagcaagaaaaagcccctggacggcgagtacttcacactgcagatccggggcagagaacgcttcgagatgttcagagagctgaacgaggccctggaactgaaggatgcccaggccggaaaagagcccggcgcccctgaactgctgggcggaccttccgtgttcctgttccccccaaagcccaaggacaccctgatgatctcccggacccccgaagtgacctgcgtggtggtggatgtgtcccacgaggaccctgaagtgaagttcaattggtacgtggacggcgtggaagtgcacaacgccaagaccaagcctagagaggaacagtacaactccacctaccgggtggtgtccgtgctgaccgtgctgcaccaggattggctgaacggcaaagagtacaagtgcaaggtgtccaacaaggccctgcctgcccccatcgaaaagaccatctccaaggccaagggccagccccgggaaccccaggtgtacacactgccccctagcagggacgagctgaccaagaaccaggtgtccctgacctgtctcgtgaaaggcttctacccctccgatatcgccgtggaatgggagtccaacggccagcctgagaacaactacaagaccaccccccctgtgctggactccgacggctcattcttcctgtacagcaagctgacagtggacaagtcccggtggcagcagggcaacgtgttctcctgctccgtgatgcacgaggccctgcacaaccactacacccagaagtccctgtccctgagccccggcaag

SEQ ID NO: 150 - DNA, 786 bp, Artificial Sequence
  Synthetic
atgggatggtcttgtataattctgttcctggtggcaacagcaacaggagtgcatagcgaggtgcagctggtggagtctgggggaggcttggtacagcccggcaggtccctgagactctcctgtgcggcctctggattcacctttgatgattatgccatgcactgggtccggcaagctccagggaagggcctggaatgggtctcagctatcacttggaatagtggtcacatagactatgcggactctgtggagggccgattcaccatctccagagacaacgccaagaactccctgtatctgcaaatgaacagtctgagagctgaggatacggccgtatattactgtgcgaaagtctcgtaccttagcaccgcgtcctcccttgactattggggccaaggtaccctggtcaccgtctcgagtggcggcggaggcagcggaggcggaggttctggaggaggggggagtgacatccagatgacccagtctccatcctccctgtctgcatctgtaggggacagagtcaccatcacttgtcgggcaagtcagggcatcagaaattacttagcctggtatcagcaaaaaccagggaaagcccctaagctcctgatctatgctgcatccactttgcaatcaggggtcccatctcggttcagtggcagtggatctgggacagatttcactctcaccatcagcagcctacagcctgaagatgttgcaacttattactgtcaaaggtataaccgtgcaccgtatacttttggccaggggaccaaggtggaaatcaaa

SEQ ID NO: 151 - protein, 285 aa, Artificial Sequence
  Synthetic
EVQLVESGGGLVQPGRSLRLSCAASGFTFDDYAMHWVRQAPGKGLEWVSAITWNSGHIDYADSVEGRFTISRDNAKNSLYLQMNSLRAEDTAVYYCAKVSYLSTASSLDYWGQGTLVTVSSGGGGSGGGGSGGGGSDIQMTQSPSSLSASVGDRVTITCRASQGIRNYLAWYQQKPGKAPKLLIYAASTLQSGVPSRFSGSGSGTDFTLTISSLQPEDVATYYCQRYNRAPYTFGQGTKVEIKKKKPLDGEYFTLQIRGRERFEMFRELNEALELKDAQAGKEPG

SEQ ID NO: 152 - protein, 248 aa, Artificial Sequence
  Synthetic
DIVLTQSPAILSASPGEKVTMTCRASSSVNYMDWYQKKPGSSPKPWIYATSNLASGVPARFSGSGSGTSYSLTISRVEAEDAATYYCQQWSFNPPTFGGGTKLEIKGSTSGGGGSGGGGSGGGGSSEVQLQQSGAELVKPGASVKMSCKASGYTFTSYNMHWVKQTPGQGLEWIGAIYPGNGDTSYNQKFKGKATLTADKSSSTAYMQLSSLTSEDSADYYCARSNYYGSSYWFFDVWGAGTTVTVSS

SEQ ID NO: 153 - protein, 290 aa, Artificial Sequence
  Synthetic
DIVLTQSPAILSASPGEKVTMTCRASSSVNYMDWYQKKPGSSPKPWIYATSNLASGVPARFSGSGSGTSYSLTISRVEAEDAATYYCQQWSFNPPTFGGGTKLEIKGSTSGGGGSGGGGSGGGGSSEVQLQQSGAELVKPGASVKMSCKASGYTFTSYNMHWVKQTPGQGLEWIGAIYPGNGDTSYNQKFKGKATLTADKSSSTAYMQLSSLTSEDSADYYCARSNYYGSSYWFFDVWGAGTTVTVSSKKKPLDGEYFTLQIRGRERFEMFRELNEALELKDAQAGKEPG

SEQ ID NO: 154 - protein, 538 aa, Artificial Sequence
  Synthetic
DIVLTQSPAILSASPGEKVTMTCRASSSVNYMDWYQKKPGSSPKPWIYATSNLASGVPARFSGSGSGTSYSLTISRVEAEDAATYYCQQWSFNPPTFGGGTKLEIKGSTSGGGGSGGGGSGGGGSSEVQLQQSGAELVKPGASVKMSCKASGYTFTSYNMHWVKQTPGQGLEWIGAIYPGNGDTSYNQKFKGKATLTADKSSSTAYMQLSSLTSEDSADYYCARSNYYGSSYWFFDVWGAGTTVTVSSKKKPLDGEYFTLQIRGRERFEMFRELNEALELKDAQAGKEPGDIVLTQSPAILSASPGEKVTMTCRASSSVNYMDWYQKKPGSSPKPWIYATSNLASGVPARFSGSGSGTSYSLTISRVEAEDAATYYCQQWSFNPPTFGGGTKLEIKGSTSGGGGSGGGGSGGGGSSEVQLQQSGAELVKPGASVKMSCKASGYTFTSYNMHWVKQTPGQGLEWIGAIYPGNGDTSYNQKFKGKATLTADKSSSTAYMQLSSLTSEDSADYYCARSNYYGSSYWFFDVWGAGTTVTVSS

SEQ ID NO: 155 - protein, 270 aa, Artificial Sequence
  Synthetic
EVQLVESGGGLVQPGGSLRLSCAASGFTFSDYWMYWVRQAPGKGLEWVSEINTNGLITKYPDSVKGRFTISRDNAKNTLYLQMNSLRPEDTAVYYCARSPSGFNRGQGTLVTVSSKKKPLDGEYFTLQIRGRERFEMFRELNEALELKDAQAGKEPGEVQLVESGGGLVQAGGSLRLSCAASGSSFRFRAMAWYRQAPEKQRDFVATINSLGETTYATAVEGRFTISRDNAKNTVYLQMDSLKPEDTAVYYCNEPRGNYWGQGTQVTVSS

SEQ ID NO: 156 - protein, 530 aa, Artificial Sequence
  Synthetic
EVQLVESGGGLVQPGRSLRLSCAASGFTFDDYAMHWVRQAPGKGLEWVSAITWNSGHIDYADSVEGRFTISRDNAKNSLYLQMNSLRAEDTAVYYCAKVSYLSTASSLDYWGQGTLVTVSSGGGGSGGGGSGGGGSDIQMTQSPSSLSASVGDRVTITCRASQGIRNYLAWYQQKPGKAPKLLIYAASTLQSGVPSRFSGSGSGTDFTLTISSLQPEDVATYYCQRYNRAPYTFGQGTKVEIKKKKPLDGEYFTLQIRGRERFEMFRELNEALELKDAQAGKEPGQVQLVQSGAEVKKPGSSVKVSCKASGYSFTDYHIHWVRQAPGQGLEWMGVINPMYGTTDYNQRFKGRVTITADESTSTAYMELSSLRSEDTAVYYCARYDYFTGTGVYWGQGTLVTVSSGGGGSGGGGSGGGGSDIVMTQTPLSLSVTPGQPASISCRSSRSLVHSRGNTYLHWYLQKPGQSPQLLIYKVSNRFIGVPDRFSGSGSGTDFTLKISRVEAEDVGVYYCSQSTHLPTFGQGTKLEIK

SEQ ID NO: 157 - protein, 398 aa, Artificial Sequence
  Synthetic
EVQLVESGGGLVQPGRSLRLSCAASGFTFDDYAMHWVRQAPGKGLEWVSAITWNSGHIDYADSVEGRFTISRDNAKNSLYLQMNSLRAEDTAVYYCAKVSYLSTASSLDYWGQGTLVTVSSGGGGSGGGGSGGGGSDIQMTQSPSSLSASVGDRVTITCRASQGIRNYLAWYQQKPGKAPKLLIYAASTLQSGVPSRFSGSGSGTDFTLTISSLQPEDVATYYCQRYNRAPYTFGQGTKVEIKKKKPLDGEYFTLQIRGRERFEMFRELNEALELKDAQAGKEPGEVQLVESGGGLVQAGGSLRLSCAASGSSFRFRAMAWYRQAPEKQRDFVATINSLGETTYATAVEGRFTISRDNAKNTVYLQMDSLKPEDTAVYYCNEPRGNYWGQGTQVTVSS

SEQ ID NO: 158 - protein, 155 aa, Artificial Sequence
  Synthetic
EVQLVESGGGLVQAGGSLRLSCAASGSSFRFRAMAWYRQAPEKQRDFVATINSLGETTYATAVEGRFTISRDNAKNTVYLQMDSLKPEDTAVYYCNEPRGNYWGQGTQVTVSSKKKPLDGEYFTLQIRGRERFEMFRELNEALELKDAQAGKEPG

SEQ ID NO: 159 - protein, 300 aa, Artificial Sequence
  Synthetic
EVQLVESGGGLVQPGRSLRLSCAASGFTFDDYAMHWVRQAPGKGLEWVSAITWNSGHIDYADSVEGRFTISRDNAKNSLYLQMNSLRAEDTAVYYCAKVSYLSTASSLDYWGQGTLVTVSSGGGGSGGGGSGGGGSDIQMTQSPSSLSASVGDRVTITCRASQGIRNYLAWYQQKPGKAPKLLIYAASTLQSGVPSRFSGSGSGTDFTLTISSLQPEDVATYYCQRYNRAPYTFGQGTKVEIKGGGGSGGGGSGGGGSKKKPLDGEYFTLQIRGRERFEMFRELNEALELKDAQAGKEPG

SEQ ID NO: 160 - protein, 522 aa, Artificial Sequence
  Synthetic
DIVLTQSPAILSASPGEKVTMTCRASSSVNYMDWYQKKPGSSPKPWIYATSNLASGVPARFSGSGSGTSYSLTISRVEAEDAATYYCQQWSFNPPTFGGGTKLEIKGSTSGGGGSGGGGSGGGGSSEVQLQQSGAELVKPGASVKMSCKASGYTFTSYNMHWVKQTPGQGLEWIGAIYPGNGDTSYNQKFKGKATLTADKSSSTAYMQLSSLTSEDSADYYCARSNYYGSSYWFFDVWGAGTTVTVSSGGGGSGGGGSGGGGSAPELLGGPSVFLFPPKPKDTLMISRTPEVTCVVVDVSHEDPEVKFNWYVDGVEVHNAKTKPREEQYNSTYRVVSVLTVLHQDWLNGKEYKCKVSNKALPAPIEKTISKAKGQPREPQVYTLPPSRDELTKNQVSLTCLVKGFYPSDIAVEWESNGQPENNYKTTPPVLDSDGSFFLYSKLTVDKSRWQQGNVFSCSVMHEALHNHYTQKSLSLSPGKKKKPLDGEYFTLQIRGRERFEMFRELNEALELKDAQAGKEPG

SEQ ID NO: 161 - protein, 507 aa, Artificial Sequence
  Synthetic
DIVLTQSPAILSASPGEKVTMTCRASSSVNYMDWYQKKPGSSPKPWIYATSNLASGVPARFSGSGSGTSYSLTISRVEAEDAATYYCQQWSFNPPTFGGGTKLEIKGSTSGGGGSGGGGSGGGGSSEVQLQQSGAELVKPGASVKMSCKASGYTFTSYNMHWVKQTPGQGLEWIGAIYPGNGDTSYNQKFKGKATLTADKSSSTAYMQLSSLTSEDSADYYCARSNYYGSSYWFFDVWGAGTTVTVSSKKKPLDGEYFTLQIRGRERFEMFRELNEALELKDAQAGKEPGAPELLGGPSVFLFPPKPKDTLMISRTPEVTCVVVDVSHEDPEVKFNWYVDGVEVHNAKTKPREEQYNSTYRVVSVLTVLHQDWLNGKEYKCKVSNKALPAPIEKTISKAKGQPREPQVYTLPPSRDELTKNQVSLTCLVKGFYPSDIAVEWESNGQPENNYKTTPPVLDSDGSFFLYSKLTVDKSRWQQGNVFSCSVMHEALHNHYTQKSLSLSPGK

SEQ ID NO: 162 - protein, 243 aa, Artificial Sequence
  Synthetic
EVQLVESGGGLVQPGRSLRLSCAASGFTFDDYAMHWVRQAPGKGLEWVSAITWNSGHIDYADSVEGRFTISRDNAKNSLYLQMNSLRAEDTAVYYCAKVSYLSTASSLDYWGQGTLVTVSSGGGGSGGGGSGGGGSDIQMTQSPSSLSASVGDRVTITCRASQGIRNYLAWYQQKPGKAPKLLIYAASTLQSGVPSRFSGSGSGTDFTLTISSLQPEDVATYYCQRYNRAPYTFGQGTKVEIK

SEQ ID NO: 163 - protein, 10 aa, Homo sapiens
APELLGGPSV

SEQ ID NO: 164 - protein, 11 aa, Homo sapiens
PAPELLGGPSV

SEQ ID NO: 165 - protein, 9 aa, Homo sapiens
APPVAGPSV

SEQ ID NO: 166 - protein, 10 aa, Homo sapiens
PAPPVAGPSV

SEQ ID NO: 167 - protein, 21 aa, Homo sapiens
EPKSCDKTHTPAPELLGGPSV

SEQ ID NO: 168 - protein, 20 aa, Homo sapiens
EPKSCDKTHTAPELLGGPSV

SEQ ID NO: 169 - protein, 17 aa, Homo sapiens
ERKCCVEPAPPVAGPSV

SEQ ID NO: 170 - protein, 16 aa, Homo sapiens
ERKCCVEAPPVAGPSV

SEQ ID NO: 171 - protein, 23 aa, Homo sapiens
ELKTPLGDTTHTPAPELLGGPSV

SEQ ID NO: 172 - protein, 22 aa, Homo sapiens
ELKTPLGDTTHTAPELLGGPSV

SEQ ID NO: 173 - protein, 21 aa, Homo sapiens
EPKSCDTPPPPAPELLGGPSV

SEQ ID NO: 174 - protein, 20 aa, Homo sapiens
EPKSCDTPPPAPELLGGPSV

SEQ ID NO: 175 - protein, 10 aa, Homo sapiens
APEFLGGPSV

SEQ ID NO: 176 - protein, 11 aa, Homo sapiens
PAPEFLGGPSV

SEQ ID NO: 177 - protein, 18 aa, Homo sapiens
ESKYGPPPAPEFLGGPSV

SEQ ID NO: 178 - protein, 17 aa, Homo sapiens
ESKYGPPAPEFLGGPSV

SEQ ID NO: 179 - protein, 214 aa, Artificial Sequence; identical to SEQ ID NO: 105
  Synthetic

SEQ ID NO: 180 - protein, 4 aa, Homo sapiens
CPPC

SEQ ID NO: 181 - protein, 4 aa, Homo sapiens
CPRC

SEQ ID NO: 182 - protein, 4 aa, Homo sapiens
CPSC

SEQ ID NO: 183 - protein, 10 aa, Homo sapiens
EPKSCDKTHT

SEQ ID NO: 184 - protein, 7 aa, Homo sapiens
ERKCCVE

SEQ ID NO: 185 - protein, 12 aa, Homo sapiens
ELKTPLGDTTHT

SEQ ID NO: 186 - protein, 10 aa, Homo sapiens
EPKSCDTPPP

SEQ ID NO: 187 - protein, 7 aa, Homo sapiens
ESKYGPP

SEQ ID NO: 188 - DNA, 915 bp, Artificial Sequence
  Synthetic
atgggttggagttgtataattctcttcctcgtcgctactgctactggtgttcattctgaggtccaattgttggagtccggcggcggcgaggtgcaaccaggtggttcactccggttgagttgcgccgcgtcaggcgggattttcgcgattaaaccaatatcatggtataggcaagcgcccgggaaacaacgcgaatgggtgtctactaccaccagttccggggcgactaactatgcggaatcagtaaaagggcgctttacaatatctcgcgataatgcgaagaatactttgtatttgcaaatgtcatctctcagggcggaagacactgctgtttattattgtaatgtctttgaatactggggtcaaggtacgttggtgactgttaagcccggtggcagtggcggctcagaggttcaactccttgaatccggaggaggtgaggtccaaccaggcggaagtctccgcctttcatgcgcagcgtccgggtttagtttctccattaacgcaatgggatggtatcgccaagcaccgggtaaaaggcgcgagttcgttgctgctattgaatcaggtaggaacacggtttacgctgaatccgtcaaagggcgatttacaatatcccgtgataatgcgaagaatacagtttatttgcaaatgagttcactcagggcagaagacacggcggtttattactgtggactgcttaaaggaaatcgggtcgtctccccctctgtcgcgtactggggacaaggaaccctcgtgaccgttaaacccaagaagaaacctctcgatggggagtacttcactctccaaattcgaggtagggagaggtttgaaatgtttagggaactcaatgaagctctcgagcttaaagacgcgcaagctggtaaggaaccagggcatcatcaccatcatcat

SEQ ID NO: 189 - DNA, 57 bp, Artificial Sequence
  Synthetic
gcttactggggacaaggtacgctcgtaactgtcaaaccccatcatcaccatcatcat

SEQ ID NO: 190 - protein, 299 aa, Artificial Sequence
  Synthetic
MGWSCIILFLVATATGVHSEVQLLESGGGEVQPGGSLRLSCAASGGIFAIKPISWYRQAPGKQREWVSTTTSSGATNYAESVKGRFTISRDNAKNTLYLQMSSLRAEDTAVYYCNVFEYWGQGTLVTVKPGGSGGSEVQLLESGGGEVQPGGSLRLSCAASGFSFSINAMGWYRQAPGKRREFVAAIESGRNTVYAESVKGRFTISRDNAKNTVYLQMSSLRAEDTAVYYCGLLKGNRVVSPSVAYWGQGTLVTVKPKKKPLDGEYFTLQIRGRERFEMFRELNEALELKDAQAGKEPG

SEQ ID NO: 191 - protein, 293 aa, Artificial Sequence
  Synthetic
MGWSCIILFLVATATGVHSEVQLLESGGGEVQPGGSLRLSCAASGGIFAIKPISWYRQAPGKQREWVSTTTSSGATNYAESVKGRFTISRDNAKNTLYLQMSSLRAEDTAVYYCNVFEYWGQGTLVTVKPKKKPLDGEYFTLQIRGRERFEMFRELNEALELKDAQAGKEPGEVQLLESGGGEVQPGGSLRLSCAASGFSFSINAMGWYRQAPGKRREFVAAIESGRNTVYAESVKGRFTISRDNAKNTVYLQMSSLRAEDTAVYYCGLLKGNRVVSPSVAYWGQGTLVTVKP

SEQ ID NO: 192 - DNA, 1503 bp, Artificial Sequence
  Synthetic
atgggctggtcatgtataatcctctttcttgtagccacagctaccggggtacactcagaagttcaactcgtcgagagtggtggcggcttggtccaaccaggtgggagtctccgccttagctgcgcagcaagtgggtttacgtttagtgattattggatgtattgggtgcggcaagctccgggaaagggactggagtgggtctctgaaattaacacgaatggtctcattaccaaatatcctgatagtgtaaaaggacgcttcacaatttctagggataatgcaaagaacactctctaccttcaaatgaattccctgcgtcccgaagacacggcggtttattattgcgctcgatcccctagtgggtttaatcgaggacaaggaacccttgtgacagtctcgagtgcctccactaaggggccgagtgtttttccacttgccccatccagtaagagcacctctggaggaactgccgccctgggttgccttgttaaggattacttccctgagccagtaactgttagctggaactctggcgctctgaccagcggagtgcacaccttccctgctgtgctgcagtcctcagggctgtactccctttctagtgtcgtaacagtgccatcttctagcctggggacccagacgtacatctgtaacgtgaatcataaacccagtaacacaaaggtagataagaaggttgaacctaagtcctgcgataagacacataccgcccctgaactgctgggcggaccttccgtgttcctgttccccccaaagcccaaggacaccctgatgatctcccggacccccgaagtgacctgcgtggtggtggatgtgtcccacgaggaccctgaagtgaagttcaattggtacgtggacggcgtggaagtgcacaacgccaagaccaagcctagagaggaacagtacaactccacctaccgggtggtgtccgtgctgaccgtgctgcaccaggattggctgaacggcaaagagtacaagtgcaaggtgtccaacaaggccctgcctgcccccatcgaaaagaccatctccaaggccaagggccagccccgggaaccccaggtgtacacactgccccctagcagggacgagctgaccaagaaccaggtgtccctgacctgtctcgtgaaaggcttctacccctccgatatcgccgtggaatgggagtccaacggccagcctgagaacaactacaagaccaccccccctgtgctggactccgacggctcattcttcctgtacagcaagctgacagtggacaagtcccggtggcagcagggcaacgtgttctcctgctccgtgatgcacgaggccctgcacaaccactacacccagaagtccctgtccctgagccccggcaagaagaaaaagcccctggacggcgagtacttcacactgcagatccggggcagagaacgcttcgagatgttcagagagctgaacgaggccctggaactgaaggatgcccaggccggaaaagagcccggc

SEQ ID NO: 193 - DNA, 726 bp, Artificial Sequence
  Synthetic
atgggctggtcatgtataatcctctttcttgtagccacagctaccggggtacactcagaagttcaactcgtcgagagtggtggcggcttggtccaaccaggtgggagtctccgccttagctgcgcagcaagtgggtttacgtttagtgattattggatgtattgggtgcggcaagctccgggaaagggactggagtgggtctctgaaattaacacgaatggtctcattaccaaatatcctgatagtgtaaaaggacgcttcacaatttctagggataatgcaaagaacactctctaccttcaaatgaattccctgcgtcccgaagacacggcggtttattattgcgctcgatcccctagtgggtttaatcgaggacaaggaacccttgtgacagtaagctcaaaacgtacggtggccgctccctccgtgttcatcttcccaccttccgacgagcagctgaagtccggcaccgcttctgtcgtgtgcctgctgaacaacttctacccccgcgaggccaaggtgcagtggaaggtggacaacgccctgcagtccggcaactcccaggaatccgtgaccgagcaggactccaaggacagcacctactccctgtcctccaccctgaccctgtccaaggccgactacgagaagcacaaggtgtacgcctgcgaagtgacccaccagggcctgtctagccccgtgaccaagtctttcaaccggggcgagtgt

SEQ ID NO: 194 - DNA, 1575 bp, Artificial Sequence
  Synthetic
atgggttggtcttgtattattcttttcctcgtcgcaaccgctaccggggtccattccgaggtccaattgcttgaatccggaggaggtgaagtgcaacccggtgggtcacttcggctctcctgcgccgcgagtggcgggattttcgctattaaaccaatttcctggtatcgtcaagcaccaggaaaacaacgagaatgggtgtcaactactacgtcttctggggcaactaactatgcagaatcagtcaaaggacgctttacgattagtcgagataatgcgaagaatactctttatctccaaatgtcatcactcagggcagaagacactgctgtctattattgtaatgttttcgaatactggggtcaaggaactttggtgaccgtaaagcccggcggcagcggcggtagtgaagtccaactcctcgagagtggaggaggggaagtgcaacccggcggaagtttgcggcttagttgcgcagcttccggttttagctttagtataaacgcaatgggatggtatcgccaagctccggggaaaaggcgagagttcgtagctgcaattgaatctggacgtaacacggtctacgcagaatccgtcaaagggcgttttactattagtcgcgataatgctaagaatacggtttatctccaaatgtcttcactccgggcagaagacacagctgtttattactgtggattgctcaaaggaaatcgggtcgtctcaccgtcagtcgcgtactggggacaaggaacccttgtgactgttaaaccaggtggtggtggggacaagacccacaccgcccctgaactgctgggcggaccttccgtgttcctgtttcctccaaagcctaaggacaccctgatgatcagcagaacccctgaagtgacctgcgtggtggtggatgtgtcccacgaggatcccgaagtgaagttcaattggtacgtggacggcgtggaagtgcacaacgccaagaccaagcctagagaggaacagtacaacagcacctacagagtggtgtccgtgctgaccgtgctgcaccaggattggctgaacggcaaagagtacaagtgcaaggtgtccaacaaggccctgcctgctcctatcgagaaaaccatcagcaaggccaagggccagcctagggaaccccaggtttacacactgcctccaagccgggaagagatgaccaagaaccaggtgtccctgacctgcctcgtgaagggcttctacccttccgatatcgccgtggaatgggagagcaatggccagccagagaacaactacaagacaacccctcctgtgctggacagcgacggctcattcttcctgtacagcaagctgacagtggacaagtccagatggcagcagggcaacgtgttctcctgctctgtgatgcacgaggccctgcacaaccactacacccagaagtccctgagcctgtctcctggcaaaaagaaaaagcccctggacggcgagtacttcacactgcaaatccggggcagagaacgcttcgagatgttcagagagctgaacgaggccctggaactgaaggatgcccaggccggaaaagagcccggc

SEQ ID NO: 195 - DNA, 1545 bp, Artificial Sequence
  Synthetic
atgggttggtcttgtattattcttttcctcgtcgcaaccgctaccggggtccattccgaggtccaattgcttgaatccggaggaggtgaagtgcaacccggtgggtcacttcggctctcctgcgccgcgagtggcgggattttcgctattaaaccaatttcctggtatcgtcaagcaccaggaaaacaacgagaatgggtgtcaactactacgtcttctggggcaactaactatgcagaatcagtcaaaggacgctttacgattagtcgagataatgcgaagaatactctttatctccaaatgtcatcactcagggcagaagacactgctgtctattattgtaatgttttcgaatactggggtcaaggaactttggtgaccgtaaagcccggcggcagcggcggtagtgaagtccaactcctcgagtccggaggaggtgaagtgcaacccggtgggtcacttcggctctcctgcgccgcgagtggcgggattttcgctattaaaccaatttcctggtatcgtcaagcaccaggaaaacaacgagaatgggtgtcaactactacgtcttctggggcaactaactatgcagaatcagtcaaaggacgctttacgattagtcgagataatgcgaagaatactctttatctccaaatgtcatcactcagggcagaagacactgctgtctattattgtaatgttttcgaatactggggtcaaggaactttggtgaccgtaaagcccggtggtggtggggacaagacccacaccgcccctgaactgctgggcggaccttccgtgttcctgtttcctccaaagcctaaggacaccctgatgatcagcagaacccctgaagtgacctgcgtggtggtggatgtgtcccacgaggatcccgaagtgaagttcaattggtacgtggacggcgtggaagtgcacaacgccaagaccaagcctagagaggaacagtacaacagcacctacagagtggtgtccgtgctgaccgtgctgcaccaggattggctgaacggcaaagagtacaagtgcaaggtgtccaacaaggccctgcctgctcctatcgagaaaaccatcagcaaggccaagggccagcctagggaaccccaggtttacacactgcctccaagccgggaagagatgaccaagaaccaggtgtccctgacctgcctcgtgaagggcttctacccttccgatatcgccgtggaatgggagagcaatggccagccagagaacaactacaagacaacccctcctgtgctggacagcgacggctcattcttcctgtacagcaagctgacagtggacaagtccagatggcagcagggcaacgtgttctcctgctctgtgatgcacgaggccctgcacaaccactacacccagaagtccctgagcctgtctcctggcaaaaagaaaaagcccctggacggcgagtacttcacactgcaaatccggggcagagaacgcttcgagatgttcagagagctgaacgaggccctggaactgaaggatgcccaggccggaaaagagcccggc

SEQ ID NO: 196 - DNA, 1461 bp, Artificial Sequence
  Synthetic
atgggctggtcatgtataatcctctttcttgtagccacagctaccggggtacactcaagcgataccggcagacccttcgtggaaatgtacagcgagatccccgagatcatccacatgaccgagggcagagagctggtcatcccctgcagagtgacaagccccaacatcaccgtgactctgaagaagttccctctggacacactgatccccgacggcaagagaatcatctgggacagccggaagggcttcatcatcagcaacgccacctacaaagagatcggcctgctgacctgtgaagccaccgtgaatggccacctgtacaagaccaactacctgacacacagacagaccaacaccatcatcgacgtggtgctgagccctagccacggcattgaactgtctgtgggcgagaagctggtgctgaactgtaccgccagaaccgagctgaacgtgggcatcgacttcaactgggagtaccccagcagcaagcaccagcacaagaaactggtcaaccgggacctgaaaacccagagcggcagcgagatgaagaaattcctgagcaccctgaccatcgacggcgtgaccagatctgaccagggcctgtacacatgtgccgccagctctggcctgatgaccaagaaaaacagcaccttcgtgcgggtgcacgagaaggacaagacccacaccgcccctgaactgctgggcggaccttccgtgttcctgtttcctccaaagcctaaggacaccctgatgatcagcagaacccctgaagtgacctgcgtggtggtggatgtgtcccacgaggatcccgaagtgaagttcaattggtacgtggacggcgtggaagtgcacaacgccaagaccaagcctagagaggaacagtacaatagcacctacagagtggtgtccgtgctgaccgtgctgcaccaggattggctgaacggcaaagagtacaagtgcaaggtgtccaacaaggccctgcctgctcctatcgagaaaaccatctccaaggccaagggccagcctagggaaccccaggtttacacactgcctccaagcagggacgagctgacaaagaaccaggtgtccctgacctgcctggtcaagggcttctacccttccgatatcgccgtggaatgggagagcaatggccagcctgagaacaactacaagacaacccctcctgtgctggacagcgacggctcattcttcctgtacagcaagctgacagtggacaagagcagatggcagcagggcaacgtgttctcctgctctgtgatgcacgaggccctgcacaaccactacacccagaagtccctgagcctgtctcctggaaagaaaaagcccctggacggcgagtacttcacactgcaaatccggggcagagaacgcttcgagatgttcagagagctgaacgaggccctggaactgaaggatgcccaggccggaaaagagcccggc

SEQ ID NO: 197 - DNA, 405 bp, Artificial Sequence
  Synthetic
atgggctggtcatgtataatcctctttcttgtagccacagctaccggggtacactcagaagttcaactcgtcgagagtggtggcggcttggtccaaccaggtgggagtctccgccttagctgcgcagcaagtgggtttacgtttagtgattattggatgtattgggtgcggcaagctccgggaaagggactggagtgggtctctgaaattaacacgaatggtctcattaccaaatatcctgatagtgtaaaaggacgcttcacaatttctagggataatgcaaagaacactctctaccttcaaatgaattccctgcgtcccgaagacacggcggtttattattgcgctcgatcccctagtgggtttaatcgaggacaaggaacccttgtgacagtaagctcacac

SEQ ID NO: 198 - DNA, 528 bp, Artificial Sequence
  Synthetic
atgggctggtcatgtataatcctctttcttgtagccacagctaccggggtacactcagaagttcaactcgtcgagagtggtggcggcttggtccaaccaggtgggagtctccgccttagctgcgcagcaagtgggtttacgtttagtgattattggatgtattgggtgcggcaagctccgggaaagggactggagtgggtctctgaaattaacacgaatggtctcattaccaaatatcctgatagtgtaaaaggacgcttcacaatttctagggataatgcaaagaacactctctaccttcaaatgaattccctgcgtcccgaagacacggcggtttattattgcgctcgatcccctagtgggtttaatcgaggacaaggaacccttgtgacagtaagctcaaagaagaagccccttgacggcgagtacttcacactgcagatccggggcagagaacgcttcgagatgttcagagagctgaacgaggccctggaactgaaggatgcccaggccggaaaagagcccggc

SEQ ID NO: 199 - DNA, 876 bp, Artificial Sequence
  Synthetic
atgggctggtcatgtataatcctctttcttgtagccacagctaccggggtacactcagaagttcaactcgtcgagagtggtggcggcttggtccaaccaggtgggagtctccgccttagctgcgcagcaagtgggtttacgtttagtgattattggatgtattgggtgcggcaagctccgggaaagggactggagtgggtctctgaaattaacacgaatggtctcattaccaaatatcctgatagtgtaaaaggacgcttcacaatttctagggataatgcaaagaacactctctaccttcaaatgaattccctgcgtcccgaagacacggcggtttattattgcgctcgatcccctagtgggtttaatcgaggacaaggaacccttgtgacagtaagctcaaagaagaagccccttgacggcgagtactttactttgcaaatacgaggcagagaaagatttgaaatgtttcgggaacttaacgaagcgctggagctgaaagacgcgcaagccggcaaagaacccggagaagttcaactcgtcgagagtggtggcggcttggtccaaccaggtgggagtctccgccttagctgcgcagcaagtgggtttacgtttagtgattattggatgtattgggtgcggcaagctccgggaaagggactggagtgggtctctgaaattaacacgaatggtctcattaccaaatatcctgatagtgtaaaaggacgcttcacaatttctagggataatgcaaagaacactctctaccttcaaatgaattccctgcgtcccgaagacacggcggtttattattgcgctcgatcccctagtgggtttaatcgaggacaaggaacccttgtgacagtaagctcacac

SEQ ID NO: 200 - DNA, 1248 bp, Artificial Sequence
  Synthetic
atgggctggtcatgtataatcctctttcttgtagccacagctaccggggtacactcagaagttcaactcgtcgagagtggtggcggcttggtccaaccaggtgggagtctccgccttagctgcgcagcaagtgggtttacgtttagtgattattggatgtattgggtgcggcaagctccgggaaagggactggagtgggtctctgaaattaacacgaatggtctcattaccaaatatcctgatagtgtaaaaggacgcttcacaatttctagggataatgcaaagaacactctctaccttcaaatgaattccctgcgtcccgaagacacggcggtttattattgcgctcgatcccctagtgggtttaatcgaggacaaggaacccttgtgacagtctcgagtggcggcagcggcggtagtgaagttcaactcgtcgagagtggtggcggcttggtccaaccaggtgggagtctccgccttagctgcgcagcaagtgggtttacgtttagtgattattggatgtattgggtgcggcaagctccgggaaagggactggagtgggtctctgaaattaacacgaatggtctcattaccaaatatcctgatagtgtaaaaggacgcttcacaatttctagggataatgcaaagaacactctctaccttcaaatgaattccctgcgtcccgaagacacggcggtttattattgcgctcgatcccctagtgggtttaatcgaggacaaggaacccttgtgacagtctcgtcaggcggaggcggttccggagggggaggatccgcctccactaaggggccgagtgtttttccacttgccccatccagtaagagcacctctggaggaactgccgccctgggttgccttgttaaggattacttccctgagccagtaactgttagctggaactctggcgctctgaccagcggagtgcacaccttccctgctgtgctgcagtcctcagggctgtactccctttctagtgtcgtaacagtgccatcttctagcctggggacccagacgtacatctgtaacgtgaatcataaacccagtaacacaaaggtagataagaaggttgaacctaagtcctgcgataagacacataccaagaagaaaccactggatggagaatatttcacccttcagatccgtgggcgtgagcgcttcgagatgttccgagagctgaatgaggccttggaactcaaggatgcccaggctgggaaggagccagggcac

SEQ ID NO: 201 - DNA, 750 bp, Artificial Sequence
  Synthetic
atgggctggtcatgtataatcctctttcttgtagccacagctaccggggtacactcagaagttcaactcgtcgagagtggtggcggcttggtccaaccaggtgggagtctccgccttagctgcgcagcaagtgggtttacgtttagtgattattggatgtattgggtgcggcaagctccgggaaagggactggagtgggtctctgaaattaacacgaatggtctcattaccaaatatcctgatagtgtaaaaggacgcttcacaatttctagggataatgcaaagaacactctctaccttcaaatgaattccctgcgtcccgaagacacggcggtttattattgcgctcgatcccctagtgggtttaatcgaggacaaggaacccttgtgacagtctcgagtggcggaggcggttccggagggggaggatccggacagccaaaagcagccccatccgtaactctgttcccacctagttcagaggagcttcaagcaaacaaagccacacttgtttgccttattagtgatttttatcccggtgccgtgacagttgcctggaaagctgatagctcaccagtgaaagctggcgtggagacaaccacaccatctaaacaaagcaataacaagtatgctgccagctcatatctgagtctcactccagaacaatggaagtctcatcggtcctatagctgtcaagtgacccacgaaggcagtaccgtcgagaagaccgtggcaccaacagagtgtagc

SEQ ID NO: 202 - DNA, 756 bp, Artificial Sequence
  Synthetic
atgggctggtcatgtataatcctctttcttgtagccacagctaccggggtacactcagaagttcaactcgtcgagagtggtggcggcttggtccaaccaggtgggagtctccgccttagctgcgcagcaagtgggtttacgtttagtgattattggatgtattgggtgcggcaagctccgggaaagggactggagtgggtctctgaaattaacacgaatggtctcattaccaaatatcctgatagtgtaaaaggacgcttcacaatttctagggataatgcaaagaacactctctaccttcaaatgaattccctgcgtcccgaagacacggcggtttattattgcgctcgatcccctagtgggtttaatcgaggacaaggaacccttgtgacagtctcgagtggcggaggcggttccggagggggaggatccaaacgtacggtggccgctccctccgtgttcatcttcccaccttccgacgagcagctgaagtccggcaccgcttctgtcgtgtgcctgctgaacaacttctacccccgcgaggccaaggtgcagtggaaggtggacaacgccctgcaatccggcaactcccaggaatccgtgaccgagcaggactccaaggacagcacctactccctgtcctccaccctgaccctgtccaaggccgactacgagaagcacaaggtgtacgcctgcgaagtgacccaccagggcctgtctagccccgtgaccaagtctttcaaccggggcgagtgt

SEQ ID NO: 203 - DNA, 1113 bp, Artificial Sequence
  Synthetic
atgggctggtcatgtataatcctctttcttgtagccacagctaccggggtacactcagaagttcaactcgtcgagagtggtggcggcttggtccaaccaggtgggagtctccgccttagctgcgcagcaagtgggtttacgtttagtgattattggatgtattgggtgcggcaagctccgggaaagggactggagtgggtctctgaaattaacacgaatggtctcattaccaaatatcctgatagtgtaaaaggacgcttcacaatttctagggataatgcaaagaacactctctaccttcaaatgaattccctgcgtcccgaagacacggcggtttattattgcgctcgatcccctagtgggtttaatcgaggacaaggaacccttgtgacagtctcgagtggcggcagcggcggtagtgaagttcaactcgtcgagagtggtggcggcttggtccaaccaggtgggagtctccgccttagctgcgcagcaagtgggtttacgtttagtgattattggatgtattgggtgcggcaagctccgggaaagggactggagtgggtctctgaaattaacacgaatggtctcattaccaaatatcctgatagtgtaaaaggacgcttcacaatttctagggataatgcaaagaacactctctaccttcaaatgaattccctgcgtcccgaagacacggcggtttattattgcgctcgatcccctagtgggtttaatcgaggacaaggaacccttgtgacagtctcgtcaggcggaggcggttccggagggggaggatccggacagccaaaagcagccccatccgtaactctgttcccacctagttcagaggagcttcaagcaaacaaagccacacttgtttgccttattagtgatttttatcccggtgccgtgacagttgcctggaaagctgatagctcaccagtgaaagctggcgtggagacaaccacaccatctaaacaaagcaataacaagtatgctgccagctcatatctgagtctcactccagaacaatggaagtctcatcggtcctatagctgtcaagtgacccacgaaggcagtaccgtcgagaagaccgtggcaccaacagagtgtagc

SEQ ID NO: 204 - DNA, 1119 bp, Artificial Sequence
  Synthetic
atgggctggtcatgtataatcctctttcttgtagccacagctaccggggtacactcagaagttcaactcgtcgagagtggtggcggcttggtccaaccaggtgggagtctccgccttagctgcgcagcaagtgggtttacgtttagtgattattggatgtattgggtgcggcaagctccgggaaagggactggagtgggtctctgaaattaacacgaatggtctcattaccaaatatcctgatagtgtaaaaggacgcttcacaatttctagggataatgcaaagaacactctctaccttcaaatgaattccctgcgtcccgaagacacggcggtttattattgcgctcgatcccctagtgggtttaatcgaggacaaggaacccttgtgacagtctcgagtggcggcagcggcggtagtgaagttcaactcgtcgagagtggtggcggcttggtccaaccaggtgggagtctccgccttagctgcgcagcaagtgggtttacgtttagtgattattggatgtattgggtgcggcaagctccgggaaagggactggagtgggtctctgaaattaacacgaatggtctcattaccaaatatcctgatagtgtaaaaggacgcttcacaatttctagggataatgcaaagaacactctctaccttcaaatgaattccctgcgtcccgaagacacggcggtttattattgcgctcgatcccctagtgggtttaatcgaggacaaggaacccttgtgacagtctcgtcaggcggaggcggttccggagggggaggatccaaacgtacggtggccgctccctccgtgttcatcttcccaccttccgacgagcagctgaagtccggcaccgcttctgtcgtgtgcctgctgaacaacttctacccccgcgaggccaaggtgcagtggaaggtggacaacgccctgcaatccggcaactcccaggaatccgtgaccgagcaggactccaaggacagcacctactccctgtcctccaccctgaccctgtccaaggccgactacgagaagcacaaggtgtacgcctgcgaagtgacccaccagggcctgtctagccccgtgaccaagtctttcaaccggggcgagtgt

SEQ ID NO: 205 - DNA, 1518 bp, Artificial Sequence
  Synthetic
atgggctggtcatgtataatcctctttcttgtagccacagctaccggggtacactcagaagtgcagctgctggaatctggcggaggactggttcaacctggcggctctctgagactgtcttgtgccgccagcggcttcaccttcagcagctatatcatgatgtgggtccgacaggcccctggcaaaggccttgaatgggtgtccagcatctatcccagcggcggcatcaccttttacgccgacacagtgaagggcagattcaccatcagccgggacaacagcaagaacaccctgtacctgcagatgaacagcctgagagccgaggacaccgccgtgtactactgcgccagaatcaagctgggcaccgtgaccaccgtggattattggggacagggcaccctggtcaccgtctcgagtgcctccactaaggggccgagtgtttttccacttgccccatccagtaagagcacctctggaggaactgccgccctgggttgccttgttaaggattacttccctgagccagtaactgttagctggaactctggcgctctgaccagcggagtgcacaccttccctgctgtgctgcagtcctcagggctgtactccctttctagtgtcgtaacagtgccatcttctagcctggggacccagacgtacatctgtaacgtgaatcataaacccagtaacacaaaggtagataagaaggttgaacctaagtcctgcgataagacacataccgcccctgaactgctgggcggaccttccgtgttcctgttccccccaaagcccaaggacaccctgatgatctcccggacccccgaagtgacctgcgtggtggtggatgtgtcccacgaggaccctgaagtgaagttcaattggtacgtggacggcgtggaagtgcacaacgccaagaccaagcctagagaggaacagtacaactccacctaccgggtggtgtccgtgctgaccgtgctgcaccaggattggctgaacggcaaagagtacaagtgcaaggtgtccaacaaggccctgcctgcccccatcgaaaagaccatctccaaggccaagggccagccccgggaaccccaggtgtacacactgccccctagcagggacgagctgaccaagaaccaggtgtccctgacctgtctcgtgaaaggcttctacccctccgatatcgccgtggaatgggagtccaacggccagcctgagaacaactacaagaccaccccccctgtgctggactccgacggctcattcttcctgtacagcaagctgacagtggacaagtcccggtggcagcagggcaacgtgttctcctgctccgtgatgcacgaggccctgcacaaccactacacccagaagtccctgtccctgagccccggcaagaagaaaaagcccctggacggcgagtacttcacactgcagatccggggcagagaacgcttcgagatgttcagagagctgaacgaggccctggaactgaaggatgcccaggccggaaaagagcccggc

SEQ ID NO: 206 - DNA, 705 bp, Artificial Sequence
  Synthetic
atgggctggtcatgtataatcctctttcttgtagccacagctaccggggtacactcacagtctgctctgacacagcctgcctctgtgtctggctctcctggccagagcatcaccatcagctgtaccggcaccagctctgatgtcggcggctacaattacgtgtcctggtatcagcagcaccccggcaaggcccctaagctgatgatctacgacgtgtccaacagacccagcggcgtgtccaatagattctccggcagcaagagcggcaacaccgccagcctgacaattagcggactgcaggccgaggacgaggccgattactactgtagcagctacaccagctccagcaccagagtgtttggcaccggcacaaaagtgaccgtgctgggccagcctaaggccaatcctaccgtgacactgttccctccaagcagcgaggaactgcaggctaacaaggccacactcgtgtgcctgatcagcgacttttatcctggcgccgtgaccgtggcctggaaggctgatggatctcctgtgaaagccggcgtggaaaccaccaagcctagcaagcagagcaacaacaaatacgccgccagcagctacctgagcctgacacctgagcagtggaagtcccacagatcctacagctgccaagtgacccacgagggcagcaccgtggaaaaaacagtggcccctaccgagtgcagc

SEQ ID NO: 207 - DNA, 1521 bp, Artificial Sequence
  Synthetic
atgggatggtcttgtataattctgttcctggtggcaacagcaacaggagtgcatagcgaggtgcagctggtggagtctgggggaggcttggtacagcccggcaggtccctgagactctcctgtgcggcctctggattcacctttgatgattatgccatgcactgggtccggcaagctccagggaagggcctggaatgggtctcagctatcacttggaatagtggtcacatagactatgcggactctgtggagggccgattcaccatctccagagacaacgccaagaactccctgtatctgcaaatgaacagtctgagagctgaggatacggccgtatattactgtgcgaaagtctcgtaccttagcaccgcgtcctcccttgactattggggccaaggtaccctggtcaccgtctcgagtgcctccactaaggggccgagtgtttttccacttgccccatccagtaagagcacctctggaggaactgccgccctgggttgccttgttaaggattacttccctgagccagtaactgttagctggaactctggcgctctgaccagcggagtgcacaccttccctgctgtgctgcagtcctcagggctgtactccctttctagtgtcgtaacagtgccatcttctagcctggggacccagacgtacatctgtaacgtgaatcataaacccagtaacacaaaggtagataagaaggttgaacctaagtcctgcgataagacacataccgcccctgaactgctgggcggaccttccgtgttcctgttccccccaaagcccaaggacaccctgatgatctcccggacccccgaagtgacctgcgtggtggtggatgtgtcccacgaggaccctgaagtgaagttcaattggtacgtggacggcgtggaagtgcacaacgccaagaccaagcctagagaggaacagtacaactccacctaccgggtggtgtccgtgctgaccgtgctgcaccaggattggctgaacggcaaagagtacaagtgcaaggtgtccaacaaggccctgcctgcccccatcgaaaagaccatctccaaggccaagggccagccccgggaaccccaggtgtacacactgccccctagcagggacgagctgaccaagaaccaggtgtccctgacctgtctcgtgaaaggcttctacccctccgatatcgccgtggaatgggagtccaacggccagcctgagaacaactacaagaccaccccccctgtgctggactccgacggctcattcttcctgtacagcaagctgacagtggacaagtcccggtggcagcagggcaacgtgttctcctgctccgtgatgcacgaggccctgcacaaccactacacccagaagtccctgtccctgagccccggcaagaagaaaaagcccctggacggcgagtacttcacactgcagatccggggcagagaacgcttcgagatgttcagagagctgaacgaggccctggaactgaaggatgcccaggccggaaaagagcccggc

SEQ ID NO: 208 - DNA, 699 bp, Artificial Sequence
  Synthetic
atgggatggtcttgtataattctgttcctggtggcaacagcaacaggagtgcatagcgacatccagatgacccagtctccatcctccctgtctgcatctgtaggggacagagtcaccatcacttgtcgggcaagtcagggcatcagaaattacttagcctggtatcagcaaaaaccagggaaagcccctaagctcctgatctatgctgcatccactttgcaatcaggggtcccatctcggttcagtggcagtggatctgggacagatttcactctcaccatcagcagcctacagcctgaagatgttgcaacttattactgtcaaaggtataaccgtgcaccgtatacttttggccaggggaccaaggtggaaatcaaacgtacggtggccgctccctccgtgttcatcttcccaccttccgacgagcagctgaagtccggcaccgcttctgtcgtgtgcctgctgaacaacttctacccccgcgaggccaaggtgcagtggaaggtggacaacgccctgcagtccggcaactcccaggaatccgtgaccgagcaggactccaaggacagcacctactccctgtcctccaccctgaccctgtccaaggccgactacgagaagcacaaggtgtacgcctgcgaagtgacccaccagggcctgtctagccccgtgaccaagtctttcaaccggggcgagtgt

SEQ ID NO: 209 - protein, 482 aa, Artificial Sequence
  Synthetic
EVQLVESGGGLVQPGGSLRLSCAASGFTFSDYWMYWVRQAPGKGLEWVSEINTNGLITKYPDSVKGRFTISRDNAKNTLYLQMNSLRPEDTAVYYCARSPSGFNRGQGTLVTVSSASTKGPSVFPLAPSSKSTSGGTAALGCLVKDYFPEPVTVSWNSGALTSGVHTFPAVLQSSGLYSLSSVVTVPSSSLGTQTYICNVNHKPSNTKVDKKVEPKSCDKTHTAPELLGGPSVFLFPPKPKDTLMISRTPEVTCVVVDVSHEDPEVKFNWYVDGVEVHNAKTKPREEQYNSTYRVVSVLTVLHQDWLNGKEYKCKVSNKALPAPIEKTISKAKGQPREPQVYTLPPSRDELTKNQVSLTCLVKGFYPSDIAVEWESNGQPENNYKTTPPVLDSDGSFFLYSKLTVDKSRWQQGNVFSCSVMHEALHNHYTQKSLSLSPGKKKKPLDGEYFTLQIRGRERFEMFRELNEALELKDAQAGKEPG

SEQ ID NO: 210 - protein, 223 aa, Artificial Sequence
  Synthetic
EVQLVESGGGLVQPGGSLRLSCAASGFTFSDYWMYWVRQAPGKGLEWVSEINTNGLITKYPDSVKGRFTISRDNAKNTLYLQMNSLRPEDTAVYYCARSPSGFNRGQGTLVTVSSKRTVAAPSVFIFPPSDEQLKSGTASVVCLLNNFYPREAKVQWKVDNALQSGNSQESVTEQDSKDSTYSLSSTLTLSKADYEKHKVYACEVTHQGLSSPVTKSFNRGEC

SEQ ID NO: 211 - protein, 506 aa, Artificial Sequence
  Synthetic
EVQLLESGGGEVQPGGSLRLSCAASGGIFAIKPISWYRQAPGKQREWVSTTTSSGATNYAESVKGRFTISRDNAKNTLYLQMSSLRAEDTAVYYCNVFEYWGQGTLVTVKPGGSGGSEVQLLESGGGEVQPGGSLRLSCAASGFSFSINAMGWYRQAPGKRREFVAAIESGRNTVYAESVKGRFTISRDNAKNTVYLQMSSLRAEDTAVYYCGLLKGNRVVSPSVAYWGQGTLVTVKPGGGGDKTHTAPELLGGPSVFLFPPKPKDTLMISRTPEVTCVVVDVSHEDPEVKFNWYVDGVEVHNAKTKPREEQYNSTYRVVSVLTVLHQDWLNGKEYKCKVSNKALPAPIEKTISKAKGQPREPQVYTLPPSREEMTKNQVSLTCLVKGFYPSDIAVEWESNGQPENNYKTTPPVLDSDGSFFLYSKLTVDKSRWQQGNVFSCSVMHEALHNHYTQKSLSLSPGKKKKPLDGEYFTLQIRGRERFEMFRELNEALELKDAQAGKEPG

SEQ ID NO: 212 - protein, 496 aa, Artificial Sequence
  Synthetic
EVQLLESGGGEVQPGGSLRLSCAASGGIFAIKPISWYRQAPGKQREWVSTTTSSGATNYAESVKGRFTISRDNAKNTLYLQMSSLRAEDTAVYYCNVFEYWGQGTLVTVKPGGSGGSEVQLLESGGGEVQPGGSLRLSCAASGGIFAIKPISWYRQAPGKQREWVSTTTSSGATNYAESVKGRFTISRDNAKNTLYLQMSSLRAEDTAVYYCNVFEYWGQGTLVTVKPGGGGDKTHTAPELLGGPSVFLFPPKPKDTLMISRTPEVTCVVVDVSHEDPEVKFNWYVDGVEVHNAKTKPREEQYNSTYRVVSVLTVLHQDWLNGKEYKCKVSNKALPAPIEKTISKAKGQPREPQVYTLPPSREEMTKNQVSLTCLVKGFYPSDIAVEWESNGQPENNYKTTPPVLDSDGSFFLYSKLTVDKSRWQQGNVFSCSVMHEALHNHYTQKSLSLSPGKKKKPLDGEYFTLQIRGRERFEMFRELNEALELKDAQAGKEPG

SEQ ID NO: 213 - protein, 468 aa, Artificial Sequence
  Synthetic
SDTGRPFVEMYSEIPEIIHMTEGRELVIPCRVTSPNITVTLKKFPLDTLIPDGKRIIWDSRKGFIISNATYKEIGLLTCEATVNGHLYKTNYLTHRQTNTIIDVVLSPSHGIELSVGEKLVLNCTARTELNVGIDFNWEYPSSKHQHKKLVNRDLKTQSGSEMKKFLSTLTIDGVTRSDQGLYTCAASSGLMTKKNSTFVRVHEKDKTHTAPELLGGPSVFLFPPKPKDTLMISRTPEVTCVVVDVSHEDPEVKFNWYVDGVEVHNAKTKPREEQYNSTYRVVSVLTVLHQDWLNGKEYKCKVSNKALPAPIEKTISKAKGQPREPQVYTLPPSRDELTKNQVSLTCLVKGFYPSDIAVEWESNGQPENNYKTTPPVLDSDGSFFLYSKLTVDKSRWQQGNVFSCSVMHEALHNHYTQKSLSLSPGKKKPLDGEYFTLQIRGRERFEMFRELNEALELKDAQAGKEPG

SEQ ID NO: 214 - protein, 115 aa, Artificial Sequence
  Synthetic
EVQLVESGGGLVQPGGSLRLSCAASGFTFSDYWMYWVRQAPGKGLEWVSEINTNGLITKYPDSVKGRFTISRDNAKNTLYLQMNSLRPEDTAVYYCARSPSGFNRGQGTLVTVSS

SEQ ID NO: 215 - protein, 157 aa, Artificial Sequence
  Synthetic
EVQLVESGGGLVQPGGSLRLSCAASGFTFSDYWMYWVRQAPGKGLEWVSEINTNGLITKYPDSVKGRFTISRDNAKNTLYLQMNSLRPEDTAVYYCARSPSGFNRGQGTLVTVSSKKKPLDGEYFTLQIRGRERFEMFRELNEALELKDAQAGKEPG

SEQ ID NO: 216 - protein, 272 aa, Artificial Sequence
  Synthetic
EVQLVESGGGLVQPGGSLRLSCAASGFTFSDYWMYWVRQAPGKGLEWVSEINTNGLITKYPDSVKGRFTISRDNAKNTLYLQMNSLRPEDTAVYYCARSPSGFNRGQGTLVTVSSKKKPLDGEYFTLQIRGRERFEMFRELNEALELKDAQAGKEPGEVQLVESGGGLVQPGGSLRLSCAASGFTFSDYWMYWVRQAPGKGLEWVSEINTNGLITKYPDSVKGRFTISRDNAKNTLYLQMNSLRPEDTAVYYCARSPSGFNRGQGTLVTVSS

SEQ ID NO: 217 - protein, 396 aa, Artificial Sequence
  Synthetic
EVQLVESGGGLVQPGGSLRLSCAASGFTFSDYWMYWVRQAPGKGLEWVSEINTNGLITKYPDSVKGRFTISRDNAKNTLYLQMNSLRPEDTAVYYCARSPSGFNRGQGTLVTVSSGGSGGSEVQLVESGGGLVQPGGSLRLSCAASGFTFSDYWMYWVRQAPGKGLEWVSEINTNGLITKYPDSVKGRFTISRDNAKNTLYLQMNSLRPEDTAVYYCARSPSGFNRGQGTLVTVSSGGGGSGGGGSASTKGPSVFPLAPSSKSTSGGTAALGCLVKDYFPEPVTVSWNSGALTSGVHTFPAVLQSSGLYSLSSVVTVPSSSLGTQTYICNVNHKPSNTKVDKKVEPKSCDKTHTKKKPLDGEYFTLQIRGRERFEMFRELNEALELKDAQAGKEPG

SEQ ID NO: 218 - protein, 231 aa, Artificial Sequence
  Synthetic
EVQLVESGGGLVQPGGSLRLSCAASGFTFSDYWMYWVRQAPGKGLEWVSEINTNGLITKYPDSVKGRFTISRDNAKNTLYLQMNSLRPEDTAVYYCARSPSGFNRGQGTLVTVSSGGGGSGGGGSGQPKAAPSVTLFPPSSEELQANKATLVCLISDFYPGAVTVAWKADSSPVKAGVETTTPSKQSNNKYAASSYLSLTPEQWKSHRSYSCQVTHEGSTVEKTVAPTECS

SEQ ID NO: 219 - protein, 233 aa, Artificial Sequence
  Synthetic
EVQLVESGGGLVQPGGSLRLSCAASGFTFSDYWMYWVRQAPGKGLEWVSEINTNGLITKYPDSVKGRFTISRDNAKNTLYLQMNSLRPEDTAVYYCARSPSGFNRGQGTLVTVSSGGGGSGGGGSKRTVAAPSVFIFPPSDEQLKSGTASVVCLLNNFYPREAKVQWKVDNALQSGNSQESVTEQDSKDSTYSLSSTLTLSKADYEKHKVYACEVTHQGLSSPVTKSFNRGEC

SEQ ID NO: 220 - protein, 352 aa, Artificial Sequence
  Synthetic
EVQLVESGGGLVQPGGSLRLSCAASGFTFSDYWMYWVRQAPGKGLEWVSEINTNGLITKYPDSVKGRFTISRDNAKNTLYLQMNSLRPEDTAVYYCARSPSGFNRGQGTLVTVSSGGSGGSEVQLVESGGGLVQPGGSLRLSCAASGFTFSDYWMYWVRQAPGKGLEWVSEINTNGLITKYPDSVKGRFTISRDNAKNTLYLQMNSLRPEDTAVYYCARSPSGFNRGQGTLVTVSSGGGGSGGGGSGQPKAAPSVTLFPPSSEELQANKATLVCLISDFYPGAVTVAWKADSSPVKAGVETTTPSKQSNNKYAASSYLSLTPEQWKSHRSYSCQVTHEGSTVEKTVAPTECS

SEQ ID NO: 221 - protein, 354 aa, Artificial Sequence
  Synthetic
EVQLVESGGGLVQPGGSLRLSCAASGFTFSDYWMYWVRQAPGKGLEWVSEINTNGLITKYPDSVKGRFTISRDNAKNTLYLQMNSLRPEDTAVYYCARSPSGFNRGQGTLVTVSSGGSGGSEVQLVESGGGLVQPGGSLRLSCAASGFTFSDYWMYWVRQAPGKGLEWVSEINTNGLITKYPDSVKGRFTISRDNAKNTLYLQMNSLRPEDTAVYYCARSPSGFNRGQGTLVTVSSGGGGSGGGGSKRTVAAPSVFIFPPSDEQLKSGTASVVCLLNNFYPREAKVQWKVDNALQSGNSQESVTEQDSKDSTYSLSSTLTLSKADYEKHKVYACEVTHQGLSSPVTKSFNRGEC

SEQ ID NO: 222 - protein, 487 aa, Artificial Sequence
  Synthetic
EVQLLESGGGLVQPGGSLRLSCAASGFTFSSYIMMWVRQAPGKGLEWVSSIYPSGGITFYADTVKGRFTISRDNSKNTLYLQMNSLRAEDTAVYYCARIKLGTVTTVDYWGQGTLVTVSSASTKGPSVFPLAPSSKSTSGGTAALGCLVKDYFPEPVTVSWNSGALTSGVHTFPAVLQSSGLYSLSSVVTVPSSSLGTQTYICNVNHKPSNTKVDKKVEPKSCDKTHTAPELLGGPSVFLFPPKPKDTLMISRTPEVTCVVVDVSHEDPEVKFNWYVDGVEVHNAKTKPREEQYNSTYRVVSVLTVLHQDWLNGKEYKCKVSNKALPAPIEKTISKAKGQPREPQVYTLPPSRDELTKNQVSLTCLVKGFYPSDIAVEWESNGQPENNYKTTPPVLDSDGSFFLYSKLTVDKSRWQQGNVFSCSVMHEALHNHYTQKSLSLSPGKKKKPLDGEYFTLQIRGRERFEMFRELNEALELKDAQAGKEPG

SEQ ID NO: 223 - protein, 216 aa, Artificial Sequence
  Synthetic
QSALTQPASVSGSPGQSITISCTGTSSDVGGYNYVSWYQQHPGKAPKLMIYDVSNRPSGVSNRFSGSKSGNTASLTISGLQAEDEADYYCSSYTSSSTRVFGTGTKVTVLGQPKANPTVTLFPPSSEELQANKATLVCLISDFYPGAVTVAWKADGSPVKAGVETTKPSKQSNNKYAASSYLSLTPEQWKSHRSYSCQVTHEGSTVEKTVAPTECS

SEQ ID NO: 224 - protein, 488 aa, Artificial Sequence
  Synthetic
EVQLVESGGGLVQPGRSLRLSCAASGFTFDDYAMHWVRQAPGKGLEWVSAITWNSGHIDYADSVEGRFTISRDNAKNSLYLQMNSLRAEDTAVYYCAKVSYLSTASSLDYWGQGTLVTVSSASTKGPSVFPLAPSSKSTSGGTAALGCLVKDYFPEPVTVSWNSGALTSGVHTFPAVLQSSGLYSLSSVVTVPSSSLGTQTYICNVNHKPSNTKVDKKVEPKSCDKTHTAPELLGGPSVFLFPPKPKDTLMISRTPEVTCVVVDVSHEDPEVKFNWYVDGVEVHNAKTKPREEQYNSTYRVVSVLTVLHQDWLNGKEYKCKVSNKALPAPIEKTISKAKGQPREPQVYTLPPSRDELTKNQVSLTCLVKGFYPSDIAVEWESNGQPENNYKTTPPVLDSDGSFFLYSKLTVDKSRWQQGNVFSCSVMHEALHNHYTQKSLSLSPGKKKKPLDGEYFTLQIRGRERFEMFRELNEALELKDAQAGKEPG

SEQ ID NO: 225 - protein, 267 aa, Artificial Sequence
  Synthetic
QMQLVQSGTEVKKPGESLKISCKGSGYGFITYWIGWVRQMPGKGLEWMGIIYPGDSETRYSPSFQGQVTISADKSINTAYLQWSSLKASDTAIYYCAGGSGISTPMDVWGQGTTVTVASTKGPSVFPLAPSSKSTSGGTAALGCLVKDYFPEPVTVSWNSGALTSGVHTFPAVLQSSGLYSLSSVVTVPSSSLGTQTYICNVNHKPSNTKVDKKVEPKSCDKTHTKKKPLDGEYFTLQIRGRERFEMFRELNEALELKDAQAGKEPG

SEQ ID NO: 226 - protein, 484 aa, Artificial Sequence
  Synthetic
QMQLVQSGTEVKKPGESLKISCKGSGYGFITYWIGWVRQMPGKGLEWMGIIYPGDSETRYSPSFQGQVTISADKSINTAYLQWSSLKASDTAIYYCAGGSGISTPMDVWGQGTTVTVASTKGPSVFPLAPSSKSTSGGTAALGCLVKDYFPEPVTVSWNSGALTSGVHTFPAVLQSSGLYSLSSVVTVPSSSLGTQTYICNVNHKPSNTKVDKKVEPKSCDKTHTAPELLGGPSVFLFPPKPKDTLMISRTPEVTCVVVDVSHEDPEVKFNWYVDGVEVHNAKTKPREEQYNSTYRVVSVLTVLHQDWLNGKEYKCKVSNKALPAPIEKTISKAKGQPREPQVYTLPPSRDELTKNQVSLTCLVKGFYPSDIAVEWESNGQPENNYKTTPPVLDSDGSFFLYSKLTVDKSRWQQGNVFSCSVMHEALHNHYTQKSLSLSPGKKKKPLDGEYFTLQIRGRERFEMFRELNEALELKDAQAGKEPG

SEQ ID NO: 227 - protein, 489 aa, Artificial Sequence
  Synthetic
QMQLVQSGTEVKKPGESLKISCKGSGYGFITYWIGWVRQMPGKGLEWMGIIYPGDSETRYSPSFQGQVTISADKSINTAYLQWSSLKASDTAIYYCAGGSGISTPMDVWGQGTTVTVASTKGPSVFPLAPSSKSTSGGTAALGCLVKDYFPEPVTVSWNSGALTSGVHTFPAVLQSSGLYSLSSVVTVPSSSLGTQTYICNVNHKPSNTKVDKKVEPKSCDKTHTCPPCPAPELLGGPSVFLFPPKPKDTLMISRTPEVTCVVVDVSHEDPEVKFNWYVDGVEVHNAKTKPREEQYNSTYRVVSVLTVLHQDWLNGKEYKCKVSNKALPAPIEKTISKAKGQPREPQVYTLPPSRDELTKNQVSLTCLVKGFYPSDIAVEWESNGQPENNYKTTPPVLDSDGSFFLYSKLTVDKSRWQQGNVFSCSVMHEALHNHYTQKSLSLSPGKKKKPLDGEYFTLQIRGRERFEMFRELNEALELKDAQAGKEPG

SEQ ID NO: 228 - protein, 220 aa, Artificial Sequence
  Synthetic
DIQLTQSPDSLAVSLGERATINCKSSQSVLYSSINKNYLAWYQQKPGQPPKLLIYWASTRESGVPDRFSGSGSGTDFTLTISSLQAEDVAVYYCQQYYSTPYTFGQGTKVEIKRTVAAPSVFIFPPSDEQLKSGTASVVCLLNNFYPREAKVQWKVDNALQSGNSQESVTEQDSKDSTYSLSSTLTLSKADYEKHKVYACEVTHQGLSSPVTKSFNRGEC

SEQ ID NO: 229 - protein, 640 aa, Artificial Sequence
  Synthetic
QSTIEEQAKTFLDKFNHEAEDLFYQSSLASWNYNTNITEENVQNMNNAGDKWSAFLKEQSTLAQMYPLQEIQNLTVKLQLQALQQNGSSVLSEDKSKRLNTILNTMSTIYSTGKVCNPDNPQECLLLEPGLNEIMANSLDYNERLWAWESWRSEVGKQLRPLYEEYVVLKNEMARANHYEDYGDYWRGDYEVNGVDGYDYSRGQLIEDVEHTFEEIKPLYEHLHAYVRAKLMNAYPSYISPIGCLPAHLLGDMWGRFWTNLYSLTVPFGQKPNIDVTDAMVDQAWDAQRIFKEAEKFFVSVGLPNMTQGFWENSMLTDPGNVQKAVCHPTAWDLGKGDFRILMCTKVTMDDFLTAHHEMGHIQYDMAYAAQPFLLRNGANEGFHEAVGEIMSLSAATPKHLKSIGLLSPDFQEDNETEINFLLKQALTIVGTLPFTYMLEKWRWMVFKGEIPKDQWMKKWWEMKREIVGVVEPVPHDETYCDPASLFHVSNDYSFIRYYTRTLYQFQFQEALCQAAKHEGPLHKCDISNSTEAGQKLFNMLRLGKSEPWTLALENVVGAKNMNVRPLLNYFEPLFTWLKDQNKNSFVGWSTDWSPYADKKKPLDGEYFTLQIRGRERFEMFRELNEALELKDAQAGKEPG

SEQ ID NO: 230 - protein, 867 aa, Artificial Sequence
  Synthetic
QSTIEEQAKTFLDKFNHEAEDLFYQSSLASWNYNTNITEENVQNMNNAGDKWSAFLKEQSTLAQMYPLQEIQNLTVKLQLQALQQNGSSVLSEDKSKRLNTILNTMSTIYSTGKVCNPDNPQECLLLEPGLNEIMANSLDYNERLWAWESWRSEVGKQLRPLYEEYVVLKNEMARANHYEDYGDYWRGDYEVNGVDGYDYSRGQLIEDVEHTFEEIKPLYEHLHAYVRAKLMNAYPSYISPIGCLPAHLLGDMWGRFWTNLYSLTVPFGQKPNIDVTDAMVDQAWDAQRIFKEAEKFFVSVGLPNMTQGFWENSMLTDPGNVQKAVCHPTAWDLGKGDFRILMCTKVTMDDFLTAHHEMGHIQYDMAYAAQPFLLRNGANEGFHEAVGEIMSLSAATPKHLKSIGLLSPDFQEDNETEINFLLKQALTIVGTLPFTYMLEKWRWMVFKGEIPKDQWMKKWWEMKREIVGVVEPVPHDETYCDPASLFHVSNDYSFIRYYTRTLYQFQFQEALCQAAKHEGPLHKCDISNSTEAGQKLFNMLRLGKSEPWTLALENVVGAKNMNVRPLLNYFEPLFTWLKDQNKNSFVGWSTDWSPYADEPKSCDKTHTAPELLGGPSVFLFPPKPKDTLMISRTPEVTCVVVDVSHEDPEVKFNWYVDGVEVHNAKTKPREEQYNSTYRVVSVLTVLHQDWLNGKEYKCKVSNKALPAPIEKTISKAKGQPREPQVYTLPPSRDELTKNQVSLTCLVKGFYPSDIAVEWESNGQPENNYKTTPPVLDSDGSFFLYSKLTVDKSRWQQGNVFSCSVMHEALHNHYTQKSLSLSPGKKKKPLDGEYFTLQIRGRERFEMFRELNEALELKDAQAGKEPG

SEQ ID NO: 231 - protein, 970 aa, Artificial Sequence
  Synthetic
QSTIEEQAKTFLDKFNHEAEDLFYQSSLASWNYNTNITEENVQNMNNAGDKWSAFLKEQSTLAQMYPLQEIQNLTVKLQLQALQQNGSSVLSEDKSKRLNTILNTMSTIYSTGKVCNPDNPQECLLLEPGLNEIMANSLDYNERLWAWESWRSEVGKQLRPLYEEYVVLKNEMARANHYEDYGDYWRGDYEVNGVDGYDYSRGQLIEDVEHTFEEIKPLYEHLHAYVRAKLMNAYPSYISPIGCLPAHLLGDMWGRFWTNLYSLTVPFGQKPNIDVTDAMVDQAWDAQRIFKEAEKFFVSVGLPNMTQGFWENSMLTDPGNVQKAVCHPTAWDLGKGDFRILMCTKVTMDDFLTAHHEMGHIQYDMAYAAQPFLLRNGANEGFHEAVGEIMSLSAATPKHLKSIGLLSPDFQEDNETEINFLLKQALTIVGTLPFTYMLEKWRWMVFKGEIPKDQWMKKWWEMKREIVGVVEPVPHDETYCDPASLFHVSNDYSFIRYYTRTLYQFQFQEALCQAAKHEGPLHKCDISNSTEAGQKLFNMLRLGKSEPWTLALENVVGAKNMNVRPLLNYFEPLFTWLKDQNKNSFVGWSTDWSPYADASTKGPSVFPLAPSSKSTSGGTAALGCLVKDYFPEPVTVSWNSGALTSGVHTFPAVLQSSGLYSLSSVVTVPSSSLGTQTYICNVNHKPSNTKVDKKVEPKSCDKTHTCPPCPAPELLGGPSVFLFPPKPKDTLMISRTPEVTCVVVDVSHEDPEVKFNWYVDGVEVHNAKTKPREEQYNSTYRVVSVLTVLHQDWLNGKEYKCKVSNKALPAPIEKTISKAKGQPREPQVYTLPPSRDELTKNQVSLTCLVKGFYPSDIAVEWESNGQPENNYKTTPPVLDSDGSFFLYSKLTVDKSRWQQGNVFSCSVMHEALHNHYTQKSLSLSPGKKKKPLDGEYFTLQIRGRERFEMFRELNEALELKDAQAGKEPG

SEQ ID NO: 232 - protein, 308 aa, Artificial Sequence
  Synthetic
QVQLQESGGGLVQAGGSLRLSCAASGRTFSEYAMGWFRQAPGKEREFVATISWSGGSTYYTDSVKGRFTISRDNAKNTVYLQMNSLKPDDTAVYYCAAAGLGTVVSEWDYDYDYWGQGTQVTVSSGGSGGSQVQLQESGGGLVQAGGSLRLSCAASGRTFSEYAMGWFRQAPGKEREFVATISWSGGSTYYTDSVKGRFTISRDNAKNTVYLQMNSLKPDDTAVYYCAAAGLGTVVSEWDYDYDYWGQGTQVTVSSGGGGSGGGGSKKKPLDGEYFTLQIRGRERFEMFRELNEALELKDAQAGKEPG

SEQ ID NO: 233 - protein, 303 aa, Artificial Sequence
  Synthetic
QVQLQESGGGLVQAGGSLRLSCAASGRTFSEYAMGWFRQAPGKEREFVATISWSGGSTYYTDSVKGRFTISRDNAKNTVYLQMNSLKPDDTAVYYCAAAGLGTVVSEWDYDYDYWGQGTQVTVSSGGSGGSQVQLQESGGGLVQAGGSLRLSCVASGSIFSINAMDWYRQAPGKQRELVAGITSGGSTNYGDFVKGRFTISRDNAKNTVYLQMDSLKPEDTAVYYCAAEVGGWGPPRPDYWGHGTQVTVSSGGGGSGGGGSKKKPLDGEYFTLQIRGRERFEMFRELNEALELKDAQAGKEPG

SEQ ID NO: 234 - protein, 540 aa, Artificial Sequence
  Synthetic
  VARIANT (15)..(16): Xaa = any amino acid
QVQLQESGGGLVQAGGSLRLSCAASGRTFSEYAMGWFRQAPGKEREFVATISWSGGSTYYTDSVKGRFTISRDNAKNTVYLQMNSLKPDDTAVYYCAAAGLGTVVSEWDYDYDYWGQGTQVTVSSGGSGGSQVQLQESGGGLVQAGGSLRLSCAASGRTFSEYAMGWFRQAPGKEREFVATISWSGGSTYYTDSVKGRFTISRDNAKNTVYLQMNSLKPDDTAVYYCAAAGLGTVVSEWDYDYDYWGQGTQVTVSSGGGGSGGGGSEPKSCDKTHTCPPCPAPELLGGPSVFLFPPKPKDTLMISRTPEVTCVVVDVSHEDPEVKFNWYVDGVEVHNAKTKPREEQYNSTYRVVSVLTVLHQDWLNGKEYKCKVSNKALPAPIEKTISKAKGQPREPQVYTLPPSRDELTKNQVSLTCLVKGFYPSDIAVEWESNGQPENNYKTTPPVLDSDGSFFLYSKLTVDKSRWQQGNVFSCSVMHEALHNHYTQKSLSLSPGKKKKPLDGEYFTLQIRGRERFEMFRELNEALELKDAQAGKEPG

SEQ ID NO: 235 - protein, 535 aa, Artificial Sequence
  Synthetic
QVQLQESGGGLVQAGGSLRLSCAASGRTFSEYAMGWFRQAPGKEREFVATISWSGGSTYYTDSVKGRFTISRDNAKNTVYLQMNSLKPDDTAVYYCAAAGLGTVVSEWDYDYDYWGQGTQVTVSSGGSGGSQVQLQESGGGLVQAGGSLRLSCVASGSIFSINAMDWYRQAPGKQRELVAGITSGGSTNYGDFVKGRFTISRDNAKNTVYLQMDSLKPEDTAVYYCAAEVGGWGPPRPDYWGHGTQVTVSSGGGGSGGGGSEPKSCDKTHTCPPCPAPELLGGPSVFLFPPKPKDTLMISRTPEVTCVVVDVSHEDPEVKFNWYVDGVEVHNAKTKPREEQYNSTYRVVSVLTVLHQDWLNGKEYKCKVSNKALPAPIEKTISKAKGQPREPQVYTLPPSRDELTKNQVSLTCLVKGFYPSDIAVEWESNGQPENNYKTTPPVLDSDGSFFLYSKLTVDKSRWQQGNVFSCSVMHEALHNHYTQKSLSLSPGKKKKPLDGEYFTLQIRGRERFEMFRELNEALELKDAQAGKEPG

SEQ ID NO: 236 - protein, 330 aa, Artificial Sequence
  Synthetic
QVQLQESGGGLVQAGGSLRLSCAASGRTFSEYAMGWFRQAPGKEREFVATISWSGGSTYYTDSVKGRFTISRDNAKNTVYLQMNSLKPDDTAVYYCAAAGLGTVVSEWDYDYDYWGQGTQVTVSSGGSGGSQVQLQESGGGLVQAGGSLRLSCAASGRTFSEYAMGWFRQAPGKEREFVATISWSGGSTYYTDSVKGRFTISRDNAKNTVYLQMNSLKPDDTAVYYCAAAGLGTVVSEWDYDYDYWGQGTQVTVSSGGGGSGGGGSEPKSCDKTHTCPPCPAPELLGGKKKPLDGEYFTLQIRGRERFEMFRELNEALELKDAQAGKEPG

SEQ ID NO: 237 - protein, 325 aa, Artificial Sequence
  Synthetic
QVQLQESGGGLVQAGGSLRLSCAASGRTFSEYAMGWFRQAPGKEREFVATISWSGGSTYYTDSVKGRFTISRDNAKNTVYLQMNSLKPDDTAVYYCAAAGLGTVVSEWDYDYDYWGQGTQVTVSSGGSGGSQVQLQESGGGLVQAGGSLRLSCVASGSIFSINAMDWYRQAPGKQRELVAGITSGGSTNYGDFVKGRFTISRDNAKNTVYLQMDSLKPEDTAVYYCAAEVGGWGPPRPDYWGHGTQVTVSSGGGGSGGGGSEPKSCDKTHTCPPCPAPELLGGKKKPLDGEYFTLQIRGRERFEMFRELNEALELKDAQAGKEPG

SEQ ID NO: 238 - protein, 416 aa, Artificial Sequence
  Synthetic
QVQLQESGGGLVQAGGSLRLSCAASGRTFSEYAMGWFRQAPGKEREFVATISWSGGSTYYTDSVKGRFTISRDNAKNTVYLQMNSLKPDDTAVYYCAAAGLGTVVSEWDYDYDYWGQGTQVTVSSGGSGGSQVQLQESGGGLVQAGGSLRLSCAASGRTFSEYAMGWFRQAPGKEREFVATISWSGGSTYYTDSVKGRFTISRDNAKNTVYLQMNSLKPDDTAVYYCAAAGLGTVVSEWDYDYDYWGQGTQVTVSSGGGGSGGGGSASTKGPSVFPLAPSSKSTSGGTAALGCLVKDYFPEPVTVSWNSGALTSGVHTFPAVLQSSGLYSLSSVVTVPSSSLGTQTYICNVNHKPSNTKVDKKVEPKSCDKTHTKKKPLDGEYFTLQIRGRERFEMFRELNEALELKDAQAGKEPG

SEQ ID NO: 239 - protein, 411 aa, Artificial Sequence
  Synthetic
QVQLQESGGGLVQAGGSLRLSCAASGRTFSEYAMGWFRQAPGKEREFVATISWSGGSTYYTDSVKGRFTISRDNAKNTVYLQMNSLKPDDTAVYYCAAAGLGTVVSEWDYDYDYWGQGTQVTVSSGGSGGSQVQLQESGGGLVQAGGSLRLSCVASGSIFSINAMDWYRQAPGKQRELVAGITSGGSTNYGDFVKGRFTISRDNAKNTVYLQMDSLKPEDTAVYYCAAEVGGWGPPRPDYWGHGTQVTVSSGGGGSGGGGSASTKGPSVFPLAPSSKSTSGGTAALGCLVKDYFPEPVTVSWNSGALTSGVHTFPAVLQSSGLYSLSSVVTVPSSSLGTQTYICNVNHKPSNTKVDKKVEPKSCDKTHTKKKPLDGEYFTLQIRGRERFEMFRELNEALELKDAQAGKEPG

SEQ ID NO: 240 - protein, 374 aa, Artificial Sequence
  Synthetic
QVQLQESGGGLVQAGGSLRLSCAASGRTFSEYAMGWFRQAPGKEREFVATISWSGGSTYYTDSVKGRFTISRDNAKNTVYLQMNSLKPDDTAVYYCAAAGLGTVVSEWDYDYDYWGQGTQVTVSSGGSGGSQVQLQESGGGLVQAGGSLRLSCAASGRTFSEYAMGWFRQAPGKEREFVATISWSGGSTYYTDSVKGRFTISRDNAKNTVYLQMNSLKPDDTAVYYCAAAGLGTVVSEWDYDYDYWGQGTQVTVSSGGGGSGGGGSKRTVAAPSVFIFPPSDEQLKSGTASVVCLLNNFYPREAKVQWKVDNALQSGNSQESVTEQDSKDSTYSLSSTLTLSKADYEKHKVYACEVTHQGLSSPVTKSFNRGEC

SEQ ID NO: 241 - protein, 443 aa, Artificial Sequence
  Synthetic
QVQLQESGGGLVQAGGSLRLSCAASGRTFSEYAMGWFRQAPGKEREFVATISWSGGSTYYTDSVKGRFTISRDNAKNTVYLQMNSLKPDDTAVYYCAAAGLGTVVSEWDYDYDYWGQGTQVTVSSGGSGGSQVQLQESGGGLVQAGGSLRLSCAASGRTFSEYAMGWFRQAPGKEREFVATISWSGGSTYYTDSVKGRFTISRDNAKNTVYLQMNSLKPDDTAVYYCAAAGLGTVVSEWDYDYDYWGQGTQVTVSSGGGGSGGGGSKKKPLDGEYFTLQIRGRERFEMFRELNEALELKDAQAGKEPGGGGGSGGGGSQVQLQESGGGLVQAGGSLRLSCAASGRTFSEYAMGWFRQAPGKEREFVATISWSGGSTYYTDSVKGRFTISRDNAKNTVYLQMNSLKPDDTAVYYCAAAGLGTVVSEWDYDYDYWGQGTQVTVSS

SEQ ID NO: 242 - protein, 574 aa, Artificial Sequence
  Synthetic
QVQLQESGGGLVQAGGSLRLSCAASGRTFSEYAMGWFRQAPGKEREFVATISWSGGSTYYTDSVKGRFTISRDNAKNTVYLQMNSLKPDDTAVYYCAAAGLGTVVSEWDYDYDYWGQGTQVTVSSGGSGGSQVQLQESGGGLVQAGGSLRLSCAASGRTFSEYAMGWFRQAPGKEREFVATISWSGGSTYYTDSVKGRFTISRDNAKNTVYLQMNSLKPDDTAVYYCAAAGLGTVVSEWDYDYDYWGQGTQVTVSSGGGGSGGGGSKKKPLDGEYFTLQIRGRERFEMFRELNEALELKDAQAGKEPGGGGGSGGGGSQVQLQESGGGLVQAGGSLRLSCAASGRTFSEYAMGWFRQAPGKEREFVATISWSGGSTYYTDSVKGRFTISRDNAKNTVYLQMNSLKPDDTAVYYCAAAGLGTVVSEWDYDYDYWGQGTQVTVSSGGSGGSQVQLQESGGGLVQAGGSLRLSCAASGRTFSEYAMGWFRQAPGKEREFVATISWSGGSTYYTDSVKGRFTISRDNAKNTVYLQMNSLKPDDTAVYYCAAAGLGTVVSEWDYDYDYWGQGTQVTVSS

SEQ ID NO: 243 - protein, 465 aa, Artificial Sequence
  Synthetic
QVQLQESGGGLVQAGGSLRLSCAASGRTFSEYAMGWFRQAPGKEREFVATISWSGGSTYYTDSVKGRFTISRDNAKNTVYLQMNSLKPDDTAVYYCAAAGLGTVVSEWDYDYDYWGQGTQVTVSSGGSGGSQVQLQESGGGLVQAGGSLRLSCAASGRTFSEYAMGWFRQAPGKEREFVATISWSGGSTYYTDSVKGRFTISRDNAKNTVYLQMNSLKPDDTAVYYCAAAGLGTVVSEWDYDYDYWGQGTQVTVSSGGGGSGGGGSEPKSCDKTHTCPPCPAPELLGGKKKPLDGEYFTLQIRGRERFEMFRELNEALELKDAQAGKEPGGGGGSGGGGSQVQLQESGGGLVQAGGSLRLSCAASGRTFSEYAMGWFRQAPGKEREFVATISWSGGSTYYTDSVKGRFTISRDNAKNTVYLQMNSLKPDDTAVYYCAAAGLGTVVSEWDYDYDYWGQGTQVTVSS

SEQ ID NO: 244 - protein, 596 aa, Artificial Sequence
  Synthetic
QVQLQESGGGLVQAGGSLRLSCAASGRTFSEYAMGWFRQAPGKEREFVATISWSGGSTYYTDSVKGRFTISRDNAKNTVYLQMNSLKPDDTAVYYCAAAGLGTVVSEWDYDYDYWGQGTQVTVSSGGSGGSQVQLQESGGGLVQAGGSLRLSCAASGRTFSEYAMGWFRQAPGKEREFVATISWSGGSTYYTDSVKGRFTISRDNAKNTVYLQMNSLKPDDTAVYYCAAAGLGTVVSEWDYDYDYWGQGTQVTVSSGGGGSGGGGSEPKSCDKTHTCPPCPAPELLGGKKKPLDGEYFTLQIRGRERFEMFRELNEALELKDAQAGKEPGGGGGSGGGGSQVQLQESGGGLVQAGGSLRLSCAASGRTFSEYAMGWFRQAPGKEREFVATISWSGGSTYYTDSVKGRFTISRDNAKNTVYLQMNSLKPDDTAVYYCAAAGLGTVVSEWDYDYDYWGQGTQVTVSSGGSGGSQVQLQESGGGLVQAGGSLRLSCAASGRTFSEYAMGWFRQAPGKEREFVATISWSGGSTYYTDSVKGRFTISRDNAKNTVYLQMNSLKPDDTAVYYCAAAGLGTVVSEWDYDYDYWGQGTQVTVSS

SEQ ID NO: 245 - protein, 682 aa, Artificial Sequence
  Synthetic
QVQLQESGGGLVQAGGSLRLSCAASGRTFSEYAMGWFRQAPGKEREFVATISWSGGSTYYTDSVKGRFTISRDNAKNTVYLQMNSLKPDDTAVYYCAAAGLGTVVSEWDYDYDYWGQGTQVTVSSGGSGGSQVQLQESGGGLVQAGGSLRLSCAASGRTFSEYAMGWFRQAPGKEREFVATISWSGGSTYYTDSVKGRFTISRDNAKNTVYLQMNSLKPDDTAVYYCAAAGLGTVVSEWDYDYDYWGQGTQVTVSSGGGGSGGGGSASTKGPSVFPLAPSSKSTSGGTAALGCLVKDYFPEPVTVSWNSGALTSGVHTFPAVLQSSGLYSLSSVVTVPSSSLGTQTYICNVNHKPSNTKVDKKVEPKSCDKTHTKKKPLDGEYFTLQIRGRERFEMFRELNEALELKDAQAGKEPGGGGGSGGGGSQVQLQESGGGLVQAGGSLRLSCAASGRTFSEYAMGWFRQAPGKEREFVATISWSGGSTYYTDSVKGRFTISRDNAKNTVYLQMNSLKPDDTAVYYCAAAGLGTVVSEWDYDYDYWGQGTQVTVSSGGSGGSQVQLQESGGGLVQAGGSLRLSCAASGRTFSEYAMGWFRQAPGKEREFVATISWSGGSTYYTDSVKGRFTISRDNAKNTVYLQMNSLKPDDTAVYYCAAAGLGTVVSEWDYDYDYWGQGTQVTVSS

SEQ ID NO: 246 - protein, 638 aa, Artificial Sequence
  Synthetic
QVQLQESGGGLVQAGGSLRLSCAASGRTFSEYAMGWFRQAPGKEREFVATISWSGGSTYYTDSVKGRFTISRDNAKNTVYLQMNSLKPDDTAVYYCAAAGLGTVVSEWDYDYDYWGQGTQVTVSSGGSGGSQVQLQESGGGLVQAGGSLRLSCAASGRTFSEYAMGWFRQAPGKEREFVATISWSGGSTYYTDSVKGRFTISRDNAKNTVYLQMNSLKPDDTAVYYCAAAGLGTVVSEWDYDYDYWGQGTQVTVSSGGGGSGGGGSASTKGPSVFPLAPSSKSTSGGTAALGCLVKDYFPEPVTVSWNSGALTSGVHTFPAVLQSSGLYSLSSVVTVPSSSLGTQTYICNVNHKPSNTKVDKKVEPKSCDKTHTCPPCPAPELLGGPSVFLFPPKPKDTLMISRTPEVTCVVVDVSHEDPEVKFNWYVDGVEVHNAKTKPREEQYNSTYRVVSVLTVLHQDWLNGKEYKCKVSNKALPAPIEKTISKAKGQPREPQVYTLPPSRDELTKNQVSLTCLVKGFYPSDIAVEWESNGQPENNYKTTPPVLDSDGSFFLYSKLTVDKSRWQQGNVFSCSVMHEALHNHYTQKSLSLSPGKKKKPLDGEYFTLQIRGRERFEMFRELNEALELKDAQAGKEPG

SEQ ID NO: 247 - protein, 633 aa, Artificial Sequence
  Synthetic
QVQLQESGGGLVQAGGSLRLSCAASGRTFSEYAMGWFRQAPGKEREFVATISWSGGSTYYTDSVKGRFTISRDNAKNTVYLQMNSLKPDDTAVYYCAAAGLGTVVSEWDYDYDYWGQGTQVTVSSGGSGGSQVQLQESGGGLVQAGGSLRLSCVASGSIFSINAMDWYRQAPGKQRELVAGITSGGSTNYGDFVKGRFTISRDNAKNTVYLQMDSLKPEDTAVYYCAAEVGGWGPPRPDYWGHGTQVTVSSGGGGSGGGGSASTKGPSVFPLAPSSKSTSGGTAALGCLVKDYFPEPVTVSWNSGALTSGVHTFPAVLQSSGLYSLSSVVTVPSSSLGTQTYICNVNHKPSNTKVDKKVEPKSCDKTHTCPPCPAPELLGGPSVFLFPPKPKDTLMISRTPEVTCVVVDVSHEDPEVKFNWYVDGVEVHNAKTKPREEQYNSTYRVVSVLTVLHQDWLNGKEYKCKVSNKALPAPIEKTISKAKGQPREPQVYTLPPSRDELTKNQVSLTCLVKGFYPSDIAVEWESNGQPENNYKTTPPVLDSDGSFFLYSKLTVDKSRWQQGNVFSCSVMHEALHNHYTQKSLSLSPGKKKKPLDGEYFTLQIRGRERFEMFRELNEALELKDAQAGKEPG

SEQ ID NO: 248 - protein, 428 aa, Artificial Sequence
  Synthetic
QVQLQESGGGLVQAGGSLRLSCAASGRTFSEYAMGWFRQAPGKEREFVATISWSGGSTYYTDSVKGRFTISRDNAKNTVYLQMNSLKPDDTAVYYCAAAGLGTVVSEWDYDYDYWGQGTQVTVSSGGSGGSQVQLQESGGGLVQAGGSLRLSCAASGRTFSEYAMGWFRQAPGKEREFVATISWSGGSTYYTDSVKGRFTISRDNAKNTVYLQMNSLKPDDTAVYYCAAAGLGTVVSEWDYDYDYWGQGTQVTVSSGGGGSGGGGSASTKGPSVFPLAPSSKSTSGGTAALGCLVKDYFPEPVTVSWNSGALTSGVHTFPAVLQSSGLYSLSSVVTVPSSSLGTQTYICNVNHKPSNTKVDKKVEPKSCDKTHTCPPCPAPELLGGKKKPLDGEYFTLQIRGRERFEMFRELNEALELKDAQAGKEPG

SEQ ID NO: 249 - protein, 423 aa, Artificial Sequence
  Synthetic
QVQLQESGGGLVQAGGSLRLSCAASGRTFSEYAMGWFRQAPGKEREFVATISWSGGSTYYTDSVKGRFTISRDNAKNTVYLQMNSLKPDDTAVYYCAAAGLGTVVSEWDYDYDYWGQGTQVTVSSGGSGGSQVQLQESGGGLVQAGGSLRLSCVASGSIFSINAMDWYRQAPGKQRELVAGITSGGSTNYGDFVKGRFTISRDNAKNTVYLQMDSLKPEDTAVYYCAAEVGGWGPPRPDYWGHGTQVTVSSGGGGSGGGGSASTKGPSVFPLAPSSKSTSGGTAALGCLVKDYFPEPVTVSWNSGALTSGVHTFPAVLQSSGLYSLSSVVTVPSSSLGTQTYICNVNHKPSNTKVDKKVEPKSCDKTHTCPPCPAPELLGGKKKPLDGEYFTLQIRGRERFEMFRELNEALELKDAQAGKEPG

SEQ ID NO: 250 - protein, 492 aa, Artificial Sequence
  Synthetic
QVQLVESGGGVVQPGRSLRLSCAASGFTFSNYAMYWVRQAPGKGLEWVAVISYDGSNKYYADSVKGRFTISRDNSKNTLYLQMNSLRTEDTAVYYCASGSDYGDYLLVYWGQGTLVTVSSASTKGPSVFPLAPSSKSTSGGTAALGCLVKDYFPEPVTVSWNSGALTSGVHTFPAVLQSSGLYSLSSVVTVPSSSLGTQTYICNVNHKPSNTKVDKKVEPKSCDKTHTCPPCPAPELLGGPSVFLFPPKPKDTLMISRTPEVTCVVVDVSHEDPEVKFNWYVDGVEVHNAKTKPREEQYNSTYRVVSVLTVLHQDWLNGKEYKCKVSNKALPAPIEKTISKAKGQPREPQVYTLPPSREEMTKNQVSLTCLVKGFYPSDIAVEWESNGQPENNYKTTPPVLDSDGSFFLYSKLTVDKSRWQQGNVFSCSVMHEALHNHYTQKSLSLSPGKKKKPLDGEYFTLQIRGRERFEMFRELNEALELKDAQAGKEPG

SEQ ID NO: 251 - protein, 487 aa, Artificial Sequence
  Synthetic
QVQLVESGGGVVQPGRSLRLSCAASGFTFSNYAMYWVRQAPGKGLEWVAVISYDGSNKYYADSVKGRFTISRDNSKNTLYLQMNSLRTEDTAVYYCASGSDYGDYLLVYWGQGTLVTVSSASTKGPSVFPLAPSSKSTSGGTAALGCLVKDYFPEPVTVSWNSGALTSGVHTFPAVLQSSGLYSLSSVVTVPSSSLGTQTYICNVNHKPSNTKVDKKVEPKSCDKTHTAPELLGGPSVFLFPPKPKDTLMISRTPEVTCVVVDVSHEDPEVKFNWYVDGVEVHNAKTKPREEQYNSTYRVVSVLTVLHQDWLNGKEYKCKVSNKALPAPIEKTISKAKGQPREPQVYTLPPSRDELTKNQVSLTCLVKGFYPSDIAVEWESNGQPENNYKTTPPVLDSDGSFFLYSKLTVDKSRWQQGNVFSCSVMHEALHNHYTQKSLSLSPGKKKKPLDGEYFTLQIRGRERFEMFRELNEALELKDAQAGKEPG

SEQ ID NO: 252 - protein, 270 aa, Artificial Sequence
  Synthetic
QVQLVESGGGVVQPGRSLRLSCAASGFTFSNYAMYWVRQAPGKGLEWVAVISYDGSNKYYADSVKGRFTISRDNSKNTLYLQMNSLRTEDTAVYYCASGSDYGDYLLVYWGQGTLVTVSSASTKGPSVFPLAPSSKSTSGGTAALGCLVKDYFPEPVTVSWNSGALTSGVHTFPAVLQSSGLYSLSSVVTVPSSSLGTQTYICNVNHKPSNTKVDKKVEPKSCDKTHTKKKPLDGEYFTLQIRGRERFEMFRELNEALELKDAQAGKEPG

SEQ ID NO: 253 - protein, 216 aa, Artificial Sequence
  Synthetic
QSALTQPASVSGSPGQSITISCTGTSSDVGGYNYVSWYQQHPGKAPKLMIYDVSKRPSGVSNRFSGSKSGNTASLTISGLQSEDEADYYCNSLTSISTWVFGGGTKLTVLGQPKAAPSVTLFPPSSEELQANKATLVCLISDFYPGAVTVAWKADSSPVKAGVETTTPSKQSNNKYAASSYLSLTPEQWKSHRSYSCQVTHEGSTVEKTVAPTECS

SEQ ID NO: 254 - protein, 492 aa, Artificial Sequence
  Synthetic
QVQLVESGGGLVKPGGSLRLSCAASGFTFSDYYMSWIRQAPGKGLEWVSYITYSGSTIYYADSVKGRFTISRDNAKSSLYLQMNSLRAEDTAVYYCARDRGTTMVPFDYWGQGTLVTVSSASTKGPSVFPLAPSSKSTSGGTAALGCLVKDYFPEPVTVSWNSGALTSGVHTFPAVLQSSGLYSLSSVVTVPSSSLGTQTYICNVNHKPSNTKVDKKVEPKSCDKTHTCPPCPAPELLGGPSVFLFPPKPKDTLMISRTPEVTCVVVDVSHEDPEVKFNWYVDGVEVHNAKTKPREEQYNSTYRVVSVLTVLHQDWLNGKEYKCKVSNKALPAPIEKTISKAKGQPREPQVYTLPPSREEMTKNQVSLTCLVKGFYPSDIAVEWESNGQPENNYKTTPPVLDSDGSFFLYSKLTVDKSRWQQGNVFSCSVMHEALHNHYTQKSLSLSPGKKKKPLDGEYFTLQIRGRERFEMFRELNEALELKDAQAGKEPG

SEQ ID NO: 255 - protein, 487 aa, Artificial Sequence
  Synthetic
QVQLVESGGGLVKPGGSLRLSCAASGFTFSDYYMSWIRQAPGKGLEWVSYITYSGSTIYYADSVKGRFTISRDNAKSSLYLQMNSLRAEDTAVYYCARDRGTTMVPFDYWGQGTLVTVSSASTKGPSVFPLAPSSKSTSGGTAALGCLVKDYFPEPVTVSWNSGALTSGVHTFPAVLQSSGLYSLSSVVTVPSSSLGTQTYICNVNHKPSNTKVDKKVEPKSCDKTHTAPELLGGPSVFLFPPKPKDTLMISRTPEVTCVVVDVSHEDPEVKFNWYVDGVEVHNAKTKPREEQYNSTYRVVSVLTVLHQDWLNGKEYKCKVSNKALPAPIEKTISKAKGQPREPQVYTLPPSRDELTKNQVSLTCLVKGFYPSDIAVEWESNGQPENNYKTTPPVLDSDGSFFLYSKLTVDKSRWQQGNVFSCSVMHEALHNHYTQKSLSLSPGKKKKPLDGEYFTLQIRGRERFEMFRELNEALELKDAQAGKEPG

SEQ ID NO: 256 - protein, 270 aa, Artificial Sequence
  Synthetic
QVQLVESGGGLVKPGGSLRLSCAASGFTFSDYYMSWIRQAPGKGLEWVSYITYSGSTIYYADSVKGRFTISRDNAKSSLYLQMNSLRAEDTAVYYCARDRGTTMVPFDYWGQGTLVTVSSASTKGPSVFPLAPSSKSTSGGTAALGCLVKDYFPEPVTVSWNSGALTSGVHTFPAVLQSSGLYSLSSVVTVPSSSLGTQTYICNVNHKPSNTKVDKKVEPKSCDKTHTKKKPLDGEYFTLQIRGRERFEMFRELNEALELKDAQAGKEPG

SEQ ID NO: 257 - protein, 214 aa, Artificial Sequence
  Synthetic
DIQMTQSPSSLSASVGDRVTITCQASQDITNYLNWYQQKPGKAPKLLIYAASNLETGVPSRFSGSGSGTDFTFTISGLQPEDIATYYCQQYDNLPLTFGGGTKVEIKRTVAAPSVFIFPPSDEQLKSGTASVVCLLNNFYPREAKVQWKVDNALQSGNSQESVTEQDSKDSTYSLSSTLTLSKADYEKHKVYACEVTHQGLSSPVTKSFNRGEC

SEQ ID NO: 258 - protein, 491 aa, Artificial Sequence
  Synthetic
EVQLVESGGGLVQPGGSLRLSCAASGFTVSSNYMSWVRQAPGKGLEWVSVIYSGGSTFYADSVKGRFTISRDNSMNTLFLQMNSLRAEDTAVYYCARVLPMYGDYLDYWGQGTLVTVSSASTKGPSVFPLAPSSKSTSGGTAALGCLVKDYFPEPVTVSWNSGALTSGVHTFPAVLQSSGLYSLSSVVTVPSSSLGTQTYICNVNHKPSNTKVDKKVEPKSCDKTHTCPPCPAPELLGGPSVFLFPPKPKDTLMISRTPEVTCVVVDVSHEDPEVKFNWYVDGVEVHNAKTKPREEQYNSTYRVVSVLTVLHQDWLNGKEYKCKVSNKALPAPIEKTISKAKGQPREPQVYTLPPSREEMTKNQVSLTCLVKGFYPSDIAVEWESNGQPENNYKTTPPVLDSDGSFFLYSKLTVDKSRWQQGNVFSCSVMHEALHNHYTQKSLSLSPGKKKKPLDGEYFTLQIRGRERFEMFRELNEALELKDAQAGKEPG

SEQ ID NO: 259 - protein, 486 aa, Artificial Sequence
  Synthetic
EVQLVESGGGLVQPGGSLRLSCAASGFTVSSNYMSWVRQAPGKGLEWVSVIYSGGSTFYADSVKGRFTISRDNSMNTLFLQMNSLRAEDTAVYYCARVLPMYGDYLDYWGQGTLVTVSSASTKGPSVFPLAPSSKSTSGGTAALGCLVKDYFPEPVTVSWNSGALTSGVHTFPAVLQSSGLYSLSSVVTVPSSSLGTQTYICNVNHKPSNTKVDKKVEPKSCDKTHTAPELLGGPSVFLFPPKPKDTLMISRTPEVTCVVVDVSHEDPEVKFNWYVDGVEVHNAKTKPREEQYNSTYRVVSVLTVLHQDWLNGKEYKCKVSNKALPAPIEKTISKAKGQPREPQVYTLPPSRDELTKNQVSLTCLVKGFYPSDIAVEWESNGQPENNYKTTPPVLDSDGSFFLYSKLTVDKSRWQQGNVFSCSVMHEALHNHYTQKSLSLSPGKKKKPLDGEYFTLQIRGRERFEMFRELNEALELKDAQAGKEPG

SEQ ID NO: 260 - protein, 269 aa, Artificial Sequence
  Synthetic
EVQLVESGGGLVQPGGSLRLSCAASGFTVSSNYMSWVRQAPGKGLEWVSVIYSGGSTFYADSVKGRFTISRDNSMNTLFLQMNSLRAEDTAVYYCARVLPMYGDYLDYWGQGTLVTVSSASTKGPSVFPLAPSSKSTSGGTAALGCLVKDYFPEPVTVSWNSGALTSGVHTFPAVLQSSGLYSLSSVVTVPSSSLGTQTYICNVNHKPSNTKVDKKVEPKSCDKTHTKKKPLDGEYFTLQIRGRERFEMFRELNEALELKDAQAGKEPG

SEQ ID NO: 261 - protein, 216 aa, Artificial Sequence
  Synthetic
DIVMTQSPSSLSASVGDRVTITCRASQSISRYLNWYQQKPGKAPKLLIYAASSLQSGVPSRFSGSGSGTDFTLTISSLQPEDFATYYCQQSYSTPPEYTFGQGTKLEIKRTVAAPSVFIFPPSDEQLKSGTASVVCLLNNFYPREAKVQWKVDNALQSGNSQESVTEQDSKDSTYSLSSTLTLSKADYEKHKVYACEVTHQGLSSPVTKSFNRGEC

SEQ ID NO: 262 - protein, 120 aa, Artificial Sequence
  Synthetic
QVQLVESGGGVVQPGRSLRLSCAASGFTFSNYAMYWVRQAPGKGLEWVAVISYDGSNKYYADSVKGRFTISRDNSKNTLYLQMNSLRTEDTAVYYCASGSDYGDYLLVYWGQGTLVTVSS

SEQ ID NO: 263 - protein, 110 aa, Artificial Sequence
  Synthetic
QSALTQPASVSGSPGQSITISCTGTSSDVGGYNYVSWYQQHPGKAPKLMIYDVSKRPSGVSNRFSGSKSGNTASLTISGLQSEDEADYYCNSLTSISTWVFGGGTKLTVL

SEQ ID NO: 264 - protein, 120 aa, Artificial Sequence
  Synthetic
QVQLVESGGGLVKPGGSLRLSCAASGFTFSDYYMSWIRQAPGKGLEWVSYITYSGSTIYYADSVKGRFTISRDNAKSSLYLQMNSLRAEDTAVYYCARDRGTTMVPFDYWGQGTLVTVSS

SEQ ID NO: 265 - protein, 107 aa, Artificial Sequence
  Synthetic
DIQMTQSPSSLSASVGDRVTITCQASQDITNYLNWYQQKPGKAPKLLIYAASNLETGVPSRFSGSGSGTDFTFTISGLQPEDIATYYCQQYDNLPLTFGGGTKVEIK

SEQ ID NO: 266 - protein, 119 aa, Artificial Sequence
  Synthetic
EVQLVESGGGLVQPGGSLRLSCAASGFTVSSNYMSWVRQAPGKGLEWVSVIYSGGSTFYADSVKGRFTISRDNSMNTLFLQMNSLRAEDTAVYYCARVLPMYGDYLDYWGQGTLVTVSS

SEQ ID NO: 267 - protein, 109 aa, Artificial Sequence
  Synthetic
DIVMTQSPSSLSASVGDRVTITCRASQSISRYLNWYQQKPGKAPKLLIYAASSLQSGVPSRFSGSGSGTDFTLTISSLQPEDFATYYCQQSYSTPPEYTFGQGTKLEIK

SEQ ID NO: 268 - DNA, 369 bp, Homo sapiens
caggtgcagctggtgcagtctggggctgaggtgaagaagcctggggcctcagtgaaggtctcctgcaaggcttctggatacatcttcaccggctactatatgcactgggtgcgacaggcccctggacaggggcttgagtggatgggatggatcaaccctaacagtggtggcgcaaactatgcacagaagtttcagggcagggtcaccctgaccagggacacgtccatcaccacagtctacatggaactgagcaggctgagatttgacgacacggccgtgtattactgtgcgagaggatcccggtatgactggaaccagaacaactggttcgacccctggggccagggaaccctggtcaccgtctcctca

SEQ ID NO: 269 - DNA, 330 bp, Homo sapiens
cagtctgccctgactcagcctgcctccgtgtctgggtctcctggacagtcgatcaccatctcctgcactggaaccagcagtgacgttggtacttataactatgtctcctggtaccaacaacacccaggcaaagcccccaaactcatgatttttgatgtcagtaatcggccctcaggggtttctgatcgcttctctggctccaagtctggcaacacggcctccctgaccatctctgggctccaggctgaggacgaggctgattattactgcagctcatttacaaccagcagcactgtggttttcggcggagggaccaagctgaccgtccta

SEQ ID NO: 270 - DNA, 360 bp, Homo sapiens
caggtgcagctggtggagtctgggggaggcgtggtccagcctgggaggtccctgagactctcctgtgcagcctctggattcaccttcagtaactatgctatgtactgggtccgccaggctccaggcaaggggctggagtgggtggcagttatatcatatgatggaagtaataaatactatgcagactccgtgaagggccgattcaccatctccagagacaattccaagaacacgctgtatctgcaaatgaacagcctgagaactgaggacacggctgtgtattactgtgcgagtggctccgactacggtgactacttattggtttactggggccagggaaccctggtcaccgtctcctca

SEQ ID NO: 271 - DNA, 330 bp, Homo sapiens
cagtctgccctgactcagcctgcctccgtgtctgggtctcctggacagtcgatcaccatctcctgcactggaaccagcagtgacgttggtggttataactatgtctcctggtaccaacaacacccaggcaaagcccccaaactcatgatttatgatgtcagtaagcggccctcaggggtttctaatcgcttctctggctccaagtctggcaacacggcctccctgaccatctctgggctccagtctgaggacgaggctgattattactgcaactctttgacaagcatcagcacttgggtgttcggcggagggaccaagctgaccgtccta

SEQ ID NO: 272 - DNA, 360 bp, Homo sapiens
caggtgcagctggtggagtctgggggaggcttggtcaagcctggagggtccctgagactctcctgtgcagcctctggattcaccttcagtgactactacatgagctggatccgccaggctccagggaaggggctggagtgggtttcatacattacttatagtggtagtaccatatactacgcagactctgtgaagggccgattcaccatctccagggacaacgccaagagctcactgtatctgcaaatgaacagcctgagagccgaggacacggccgtgtattactgtgcgagagatcgcggtacaactatggtcccctttgactactggggccagggaaccctggtcaccgtctcctca

SEQ ID NO: 273 - DNA, 321 bp, Homo sapiens
gacatccagatgacccagtctccatcctccctgtctgcatctgtaggagacagagtcaccatcacttgccaggcgagtcaggacattaccaactatttaaattggtatcagcagaaaccagggaaagcccctaagctcctgatctacgctgcatccaatttggaaacaggggtcccatcaaggttcagtggaagtggatctgggacagattttactttcaccatcagcggcctgcagcctgaagatattgcaacatattactgtcaacagtatgataatctccctctcactttcggcggagggaccaaggtggagatcaaa

SEQ ID NO: 274 - DNA, 360 bp, Homo sapiens
gaggtgcagctggtggagtctgggggaggcttggtaaagcctggggggtcccttagactctcctgtgcagcctctggaatcactttcagtaacgcctggatgagttgggtccgccaggctccagggaaggggctggagtgggttggccgtattaaaagcaaaactgatggtgggacaacagactacgccgcacccgtgaaaggcagattcaccatctcaagagatgattcaaaaaacacgctgtatctacaaatgaacagcctgaaaaccgaggacacagccgtgtattactgtaccacagcgaggtgggactggtacttcgatctctggggccgtggcaccctggtcactgtctcctca

SEQ ID NO: 275 - DNA, 321 bp, Homo sapiens
gacatccagatgacccagtctccatcctccctgtctgcatctgtaggagacagagtcaccatcacttgccaggcgagtcaggacatttggaattatataaattggtatcagcagaaaccagggaaggcccctaagctcctgatctacgatgcatccaatttgaaaacaggggtcccatcaaggttcagtggaagtggatctgggacagattttactttcaccatcagcagcctgcagcctgaagatattgcaacatattactgtcaacagcatgatgatctccctccgaccttcggccaagggaccaaggtggaaatcaaa

SEQ ID NO: 276 - DNA, 369 bp, Homo sapiens
caggtgcagctggtgcagtctggggctgaggtgaagaagcctgggtcctcggtgaaggtctcctgcaaggcttctggaggcaccttcagcagctatgctatcacctgggtgcgacaggcccctggacaagggcttgagtggatgggaaggatcatccctatgtttggtatagcaaactacgcacagaagttccagggcagagtcacgattaccgcggacaaatccacgagcacagcctacatggaggtgagcagcctgagatctgaggacacggccgtgtattactgtgcgagaacaccgttttactatgatagtagtggttattaccttgactactggggccagggaaccctggtcaccgtctcctca

SEQ ID NO: 277 - DNA, 324 bp, Homo sapiens
gaaattgtgttgacgcagtctccaggcaccctgtctttgtctccaggggaaagagccaccctctcttgcagggccagtcagagtgttagcagcaactacttagcctggtaccagcagagtcctggccaggctcccaggctcctcatctatggtgcatccagcagggccactggcatcccagacaggttcagtggcagtgggtctgggacagacttcactctcaccatcagcagactggagcctgaagattttgcagtttattactgtcagcagtatgttaggtcaccccggacgttcggccaagggaccaaggtggaaatcaaa

SEQ ID NO: 278 - DNA, 354 bp, Homo sapiens
caggtgcagctgcaggagtcgggcccaggactggtgaagccttcggagaccctgtccctcacctgcactgtctctggtggctccatcaataattactactggatctggatccggcagcccccagggaagggactggagtggattgggtatatctatcacagtgggagcaccaactacaacccctccctcaagagtcgagtcaccatatcagtagacacgtccaagaaccaattctccctgaaggtgagctctgtgaccgctgcggacacggccgtgtattactgtgcgaatatggttcggggagtttatgaagatgactactggggccagggaaccctggtcaccgtctcctca

SEQ ID NO: 279 - DNA, 321 bp, Homo sapiens
gacatccagatgacccagtctccatcctccctgtctgcatctgtaggagacagagtcaccatcacttgccgggcaagtcagagcattagcaactatttaaattggtatcagcagaaaccagggaaagcccctaagctcctgatctttgctgcctccagtttgcgaagtggggtcccatcaaggttcagtggcagtggatctgggacagatttcactctcaccatcagcagtctgcaccctgaagattttgcaacttactactgtcaacagaattacaatacccccctcactttcggccctgggaccaaagtggatatcaaa

SEQ ID NO: 280 - DNA, 357 bp, Homo sapiens
gaggtgcagctggtggagtctgggggaggcttggtccagcctggggggtcactgagactctcctgtgcagcctctggaatcaccgtcagtagcaactacatgagctgggtccgccaggctccagggaaggggctggagtgggtctcacttatttatagtggtggtagcacatactacgcagactccgtgaagggcagattcaccatctccagagacaattccaagaacacgctgtatcttcaaatgaacagcctgagagtcgaggacacggctgtgtattactgtgcgagagatcacggtatggcagcagcggggtataattactggggccagggaaccctggtcaccgtctcctca

SEQ ID NO: 281 - DNA, 321 bp, Homo sapiens
gacatccagatgacccagtctccatcctccctgtctgcgtctgtaggagacagagtcaccatcacttgccaggcgagtcaggacattaacaaatatttaaattggtatcagcagaaaccagggaaagcccctaagctcctgatctacgatgcatccaatttggaaacaggggtcccatcaaggttcagtggaagtggatctgggacagattttactttcaccatcaacagcctgcagcctgaagattttgcaacatatttctgtcaacagtatgataatctccctccagcgttcggccaagggaccaaggtggaaatcaaa

SEQ ID NO: 282 - DNA, 357 bp, Homo sapiens
gaggtgcagctggtggagtctgggggaggcttggtccagcctggggggtccctgagactctcctgtgcagcctctggactcaccgtcaatcgcaactacatgagctgggtccgccaggctccagggaaggggctggagtgggtctcacttatttatagcggtggtagcacatactacgcagactccgttaagggccgattcaccatctccagagacaattccaagaacacgctgtatcttcaaatgaacagcctgagacttgaggacacggctgtgtattactgtgcgagaggtgaactggggatcccctacggtatggacgtctggggccaagggaccacggtcaccgtctcctca

SEQ ID NO: 283 - DNA, 330 bp, Homo sapiens
cagtctgtgttgacgcagccgccctcagtgtctgcggccccaggacagaaggtcaccatctcctgctctggaagcagctccaacattgggaataattatgtatcctggtaccagcagctcccaggaacagcccccaaactcctcatttatgacaataataagcgaccctcagggattcctgaccgcttctctggctccaagtctggcacgtcagccaccctgggcatcaccggactccagactggggacgaggccgattattactgcggaacatgggatagcagcctgagtgctggggtgttcggcggagggaccaagctgaccgtccta

SEQ ID NO: 284 - DNA, 357 bp, Homo sapiens
gaggtgcagctggtggagtctgggggaggcttggtccagcctggggggtccctgagactctcctgtgcagcctctgaattcaccgtcagtagcaactacatgagctgggtccgccaggctccagggaaggggctagagtgggtctcagttatttatagcggtggtagcacattttacgcagactccgtgaagggcagattcaccatctccagagacaattccaagaacacgttgtatcttcaaatgaacagtctgagagccgaggacacggctgtatattactgtgcgagagctcttccctacggtgacttgcattttgactactggggccagggaaccctggtcaccgtctcctca

SEQ ID NO: 285 - DNA, 336 bp, Homo sapiens
cagtctgtgctgacgcagccgccctcagtgtctggggccccagggcagagggtcaccatctcctgcactgggagcagctccaacatcgggacaggttatgatgtacactggtaccagcagcttccaggaacagcccccaaactcctcatctatggtaacaccaatcggccctcaggggtccctgaccgattctctggctccaagtctggcacctcagcctccctggccatcactgggctccaggctgaggatgaggctgattattactgccagtcctatgacagcagcctgagtgactcttatgtcttcggaactgggaccaaggtcaccgtccta

SEQ ID NO: 286 - protein, 243 aa, Artificial Sequence
  Synthetic
QVQLQESGGGLVQAGGSLRLSCAASGRTFSEYAMGWFRQAPGKEREFVATISWSGGSTYYTDSVKGRFTISRDNAKNTVYLQMNSLKPDDTAVYYCAAAGLGTVVSEWDYDYDYWGQGTQVTVSSGGGGSGGGGSKRTVAAPSVFIFPPSDEQLKSGTASVVCLLNNFYPREAKVQWKVDNALQSGNSQESVTEQDSKDSTYSLSSTLTLSKADYEKHKVYACEVTHQGLSSPVTKSFNRGEC

SEQ ID NO: 287 - protein, 369 aa, Artificial Sequence
  Synthetic
QVQLQESGGGLVQAGGSLRLSCAASGRTFSEYAMGWFRQAPGKEREFVATISWSGGSTYYTDSVKGRFTISRDNAKNTVYLQMNSLKPDDTAVYYCAAAGLGTVVSEWDYDYDYWGQGTQVTVSSGGSGGSQVQLQESGGGLVQAGGSLRLSCVASGSIFSINAMDWYRQAPGKQRELVAGITSGGSTNYGDFVKGRFTISRDNAKNTVYLQMDSLKPEDTAVYYCAAEVGGWGPPRPDYWGHGTQVTVSSGGGGSGGGGSKRTVAAPSVFIFPPSDEQLKSGTASVVCLLNNFYPREAKVQWKVDNALQSGNSQESVTEQDSKDSTYSLSSTLTLSKADYEKHKVYACEVTHQGLSSPVTKSFNRGEC

SEQ ID NO: 288 - protein, 130 aa, Artificial Sequence [sequence omitted]

SEQ ID NO: 289 - protein, 182 aa, Artificial Sequence
  Synthetic
DVQLQESGGGLVQPGGSLRLSCAASGLTLDYYAIGWFRQAPGKEREGVSCISSSDGSTYYADSVKGRFTTSRDNAKNTVYLQMNSLKPEDTAVYYCAAVPSTYYSGTYYYTCHPGGMDYWGKGTQVTVSSGGGGSGGGGSKKKPLDGEYFTLQIRGRERFEMFRELNEALELKDAQAGKEPG

SEQ ID NO: 290 - protein, 318 aa, Artificial Sequence
  Synthetic
DVQLQESGGGLVQPGGSLRLSCAASGLTLDYYAIGWFRQAPGKEREGVSCISSSDGSTYYADSVKGRFTTSRDNAKNTVYLQMNSLKPEDTAVYYCAAVPSTYYSGTYYYTCHPGGMDYWGKGTQVTVSSGGSGGSDVQLQESGGGLVQPGGSLRLSCAASGLTLDYYAIGWFRQAPGKEREGVSCISSSDGSTYYADSVKGRFTTSRDNAKNTVYLQMNSLKPEDTAVYYCAAVPSTYYSGTYYYTCHPGGMDYWGKGTQVTVSSGGGGSGGGGSKKKPLDGEYFTLQIRGRERFEMFRELNEALELKDAQAGKEPG

SEQ ID NO: 291 - protein, 204 aa, Artificial Sequence
  Synthetic
DVQLQESGGGLVQPGGSLRLSCAASGLTLDYYAIGWFRQAPGKEREGVSCISSSDGSTYYADSVKGRFTTSRDNAKNTVYLQMNSLKPEDTAVYYCAAVPSTYYSGTYYYTCHPGGMDYWGKGTQVTVSSGGGGSGGGGSEPKSCDKTHTCPPCPAPELLGGKKKPLDGEYFTLQIRGRERFEMFRELNEALELKDAQAGKEPG

SEQ ID NO: 292 - protein, 340 aa, Artificial Sequence
  Synthetic
DVQLQESGGGLVQPGGSLRLSCAASGLTLDYYAIGWFRQAPGKEREGVSCISSSDGSTYYADSVKGRFTTSRDNAKNTVYLQMNSLKPEDTAVYYCAAVPSTYYSGTYYYTCHPGGMDYWGKGTQVTVSSGGSGGSDVQLQESGGGLVQPGGSLRLSCAASGLTLDYYAIGWFRQAPGKEREGVSCISSSDGSTYYADSVKGRFTTSRDNAKNTVYLQMNSLKPEDTAVYYCAAVPSTYYSGTYYYTCHPGGMDYWGKGTQVTVSSGGGGSGGGGSEPKSCDKTHTCPPCPAPELLGGKKKPLDGEYFTLQIRGRERFEMFRELNEALELKDAQAGKEPG

SEQ ID NO: 293 - protein, 126 aa, Artificial Sequence
  Synthetic
EVQLVESGGGLVQAGGSLSISCAASGGSLSNYVLGWFRQAPGKEREFVAAINWRGDITIGPPNVEGRFTISRDNAKNTGYLQMNSLAPDDTAVYYCGAGTPLNPGAYIYDWSYDYWGRGTQVTVSS

SEQ ID NO: 294 - protein, 17 aa, Artificial Sequence
  Synthetic
APSQTYGGSWYWDPIGD

SEQ ID NO: 295 - DNA, 369 bp, Artificial Sequence; identical to SEQ ID NO: 268
  Synthetic

SEQ ID NO: 296 - DNA, 330 bp, Artificial Sequence; identical to SEQ ID NO: 269
  Synthetic

SEQ ID NO: 297 - DNA, 360 bp, Artificial Sequence; identical to SEQ ID NO: 270
  Synthetic

SEQ ID NO: 298 - DNA, 330 bp, Artificial Sequence; identical to SEQ ID NO: 271
  Synthetic

SEQ ID NO: 299 - DNA, 360 bp, Artificial Sequence; identical to SEQ ID NO: 272
  Synthetic

SEQ ID NO: 300 - DNA, 321 bp, Artificial Sequence; identical to SEQ ID NO: 273
  Synthetic

SEQ ID NO: 301 - DNA, 360 bp, Artificial Sequence; identical to SEQ ID NO: 274
  Synthetic

SEQ ID NO: 302 - DNA, 321 bp, Artificial Sequence; identical to SEQ ID NO: 275
  Synthetic

SEQ ID NO: 303 - DNA, 369 bp, Artificial Sequence; identical to SEQ ID NO: 276
  Synthetic

SEQ ID NO: 304 - DNA, 324 bp, Artificial Sequence; identical to SEQ ID NO: 277
  Synthetic

SEQ ID NO: 305 - DNA, 354 bp, Artificial Sequence; identical to SEQ ID NO: 278
  Synthetic

SEQ ID NO: 306 - DNA, 321 bp, Artificial Sequence; identical to SEQ ID NO: 279
  Synthetic

SEQ ID NO: 307 - protein, 125 aa, Artificial Sequence
  Synthetic
QVQLQESGGGLVQAGGSLRLSCAASGRTFSEYAMGWFRQAPGKEREFVATISWSGGSTYYTDSVKGRFTISRDNAKNTVYLQMNSLKPDDTAVYYCAAAGLGTVVSEWDYDYDYWGQGTQVTVSS

SEQ ID NO: 308 - DNA, 357 bp, Artificial Sequence; identical to SEQ ID NO: 280
  Synthetic

SEQ ID NO: 309 - DNA, 321 bp, Artificial Sequence; identical to SEQ ID NO: 281
  Synthetic

SEQ ID NO: 310 - DNA, 357 bp, Artificial Sequence; identical to SEQ ID NO: 282
  Synthetic

SEQ ID NO: 311 - DNA, 330 bp, Artificial Sequence; identical to SEQ ID NO: 283
  Synthetic

SEQ ID NO: 312 - DNA, 357 bp, Artificial Sequence; identical to SEQ ID NO: 284
  Synthetic

SEQ ID NO: 313 - DNA, 336 bp, Artificial Sequence; identical to SEQ ID NO: 285
  Synthetic

SEQ ID NO: 314 - protein, 6 aa, Artificial Sequence
  Synthetic
HHHHHH

SEQ ID NO: 315 - protein, 8 aa, Artificial Sequence
  Synthetic
HHHHHHHH

SEQ ID NO: 316 - protein, 10 aa, Artificial Sequence
  Synthetic
HHHHHHHHHH

SEQ ID NO: 317 - protein, 18 aa, Artificial Sequence
  Synthetic
KDHLIHVHLEEHAHAHNK

SEQ ID NO: 318 - protein, 8 aa, Artificial Sequence
  Synthetic
DYKDDDDK

SEQ ID NO: 319 - protein, 10 aa, Artificial Sequence
  Synthetic
EQKLISEEDL

SEQ ID NO: 320 - protein, 11 aa, Artificial Sequence
  Synthetic
MASMTGGQQMG

SEQ ID NO: 321 - protein, 15 aa, Artificial Sequence
  Synthetic
KETAAAKFERGHMDS

SEQ ID NO: 322 - protein, 26 aa, Artificial Sequence
  Synthetic
KRRWKKNFIAVSAANRFKKISSSGAL

SEQ ID NO: 323 - protein, 12 aa, Artificial Sequence
  Synthetic
LGIFEAMKMEWR

SEQ ID NO: 324 - protein, 10 aa, Artificial Sequence
  Synthetic
SAWRHPQFGG

SEQ ID NO: 325 - protein, 7 aa, Artificial Sequence
  Synthetic
WHPQFEK

SEQ ID NO: 326 - protein, 15 aa, Artificial Sequence
  Synthetic
GLNDIFEAQKIEWHE

SEQ ID NO: 327 - protein, 9 aa, Artificial Sequence
  Synthetic
DVEAWLGAR

SEQ ID NO: 328 - protein, 447 aa, Artificial Sequence
  Synthetic
EVQLVESGGGLVQPGGSLRLSCAASGFTFSGYPMHWVRQAPGKGLEWVAVISYDGSNKYYADSVKGRFTISRDNSKNTLYLQMNSLRAEDTAVYYCAKDGSPRTPSFDYWGQGTLVTVASTKGPSVFPLAPSSKSTSGGTAALGCLVKDYFPEPVTVSWNSGALTSGVHTFPAVLQSSGLYSLSSVVTVPSSSLGTQTYICNVNHKPSNTKVDKKVEPKSCDKTHTCPPCPAPELLGGPSVFLFPPKPKDTLMISRTPEVTCVVVDVSHEDPEVKFNWYVDGVEVHNAKTKPREEQYNSTYRVVSVLTVLHQDWLNGKEYKCKVSNKALPAPIEKTISKAKGQPREPQVYTLPPSRDELTKNQVSLTCLVKGFYPSDIAVEWESNGQPENNYKTTPPVLDSDGSFFLYSKLTVDKSRWQQGNVFSCSVMHEALHNHYTQKSLSLSPG

SEQ ID NO: 329 - protein, 214 aa, Artificial Sequence
  Synthetic
DIQMTQSPHSLSASVGDRVTITCRASQGISNYLAWYQQKPGKVPKLLIYAASTLQSGVPSRFSGSGSGTDFTLTISSLQPEDVGVYYCQQRFRTPVTFGQGTKLEIKRTVAAPSVFIFPPSDEQLKSGTASVVCLLNNFYPREAKVQWKVDNALQSGNSQESVTEQDSKDSTYSLSSTLTLSKADYEKHKVYACEVTHQGLSSPVTKSFNRGEC

SEQ ID NO: 330 - protein, 268 aa, Artificial Sequence
  Synthetic
EVQLVESGGGLVQPGGSLRLSCAASGFTFSGYPMHWVRQAPGKGLEWVAVISYDGSNKYYADSVKGRFTISRDNSKNTLYLQMNSLRAEDTAVYYCAKDGSPRTPSFDYWGQGTLVTVASTKGPSVFPLAPSSKSTSGGTAALGCLVKDYFPEPVTVSWNSGALTSGVHTFPAVLQSSGLYSLSSVVTVPSSSLGTQTYICNVNHKPSNTKVDKKVEPKSCDKTHTKKKPLDGEYFTLQIRGRERFEMFRELNEALELKDAQAGKEPG

SEQ ID NO: 331 - protein, 485 aa, Artificial Sequence
  Synthetic
EVQLVESGGGLVQPGGSLRLSCAASGFTFSGYPMHWVRQAPGKGLEWVAVISYDGSNKYYADSVKGRFTISRDNSKNTLYLQMNSLRAEDTAVYYCAKDGSPRTPSFDYWGQGTLVTVASTKGPSVFPLAPSSKSTSGGTAALGCLVKDYFPEPVTVSWNSGALTSGVHTFPAVLQSSGLYSLSSVVTVPSSSLGTQTYICNVNHKPSNTKVDKKVEPKSCDKTHTAPELLGGPSVFLFPPKPKDTLMISRTPEVTCVVVDVSHEDPEVKFNWYVDGVEVHNAKTKPREEQYNSTYRVVSVLTVLHQDWLNGKEYKCKVSNKALPAPIEKTISKAKGQPREPQVYTLPPSRDELTKNQVSLTCLVKGFYPSDIAVEWESNGQPENNYKTTPPVLDSDGSFFLYSKLTVDKSRWQQGNVFSCSVMHEALHNHYTQKSLSLSPGKKKKPLDGEYFTLQIRGRERFEMFRELNEALELKDAQAGKEPG

SEQ ID NO: 332 - protein, 240 aa, Artificial Sequence
  Synthetic
EVQLVESGGGLVQPGGSLRLSCAASGFTFSGYPMHWVRQAPGKGLEWVAVISYDGSNKYYADSVKGRFTISRDNSKNTLYLQMNSLRAEDTAVYYCAKDGSPRTPSFDYWGQGTLVTVGGGGSGGGGSGGGGSDIQMTQSPHSLSASVGDRVTITCRASQGISNYLAWYQQKPGKVPKLLIYAASTLQSGVPSRFSGSGSGTDFTLTISSLQPEDVGVYYCQQRFRTPVTFGQGTKLEIK

SEQ ID NO: 333 - protein, 282 aa, Artificial Sequence
  Synthetic
EVQLVESGGGLVQPGGSLRLSCAASGFTFSGYPMHWVRQAPGKGLEWVAVISYDGSNKYYADSVKGRFTISRDNSKNTLYLQMNSLRAEDTAVYYCAKDGSPRTPSFDYWGQGTLVTVGGGGSGGGGSGGGGSDIQMTQSPHSLSASVGDRVTITCRASQGISNYLAWYQQKPGKVPKLLIYAASTLQSGVPSRFSGSGSGTDFTLTISSLQPEDVGVYYCQQRFRTPVTFGQGTKLEIKKKKPLDGEYFTLQIRGRERFEMFRELNEALELKDAQAGKEPG

SEQ ID NO: 334 - protein, 509 aa, Artificial Sequence
  Synthetic
EVQLVESGGGLVQPGGSLRLSCAASGFTFSGYPMHWVRQAPGKGLEWVAVISYDGSNKYYADSVKGRFTISRDNSKNTLYLQMNSLRAEDTAVYYCAKDGSPRTPSFDYWGQGTLVTVGGGGSGGGGSGGGGSDIQMTQSPHSLSASVGDRVTITCRASQGISNYLAWYQQKPGKVPKLLIYAASTLQSGVPSRFSGSGSGTDFTLTISSLQPEDVGVYYCQQRFRTPVTFGQGTKLEIKEPKSCDKTHTAPELLGGPSVFLFPPKPKDTLMISRTPEVTCVVVDVSHEDPEVKFNWYVDGVEVHNAKTKPREEQYNSTYRVVSVLTVLHQDWLNGKEYKCKVSNKALPAPIEKTISKAKGQPREPQVYTLPPSRDELTKNQVSLTCLVKGFYPSDIAVEWESNGQPENNYKTTPPVLDSDGSFFLYSKLTVDKSRWQQGNVFSCSVMHEALHNHYTQKSLSLSPGKKKKPLDGEYFTLQIRGRERFEMFRELNEALELKDAQAGKEPG

SEQ ID NO: 335 - protein, 447 aa, Artificial Sequence
  Synthetic
EVQLVESGGGLVQPGGSLRLSCAASGFTFSDHYMDWVRQAPGKGLEWVGRTRNKANSYTTEYAASVKGRFTISRDDSKNSLYLQMNSLKTEDTAVYYCAKGLTPLYFDYWGQGTLVTVASTKGPSVFPLAPSSKSTSGGTAALGCLVKDYFPEPVTVSWNSGALTSGVHTFPAVLQSSGLYSLSSVVTVPSSSLGTQTYICNVNHKPSNTKVDKKVEPKSCDKTHTCPPCPAPELLGGPSVFLFPPKPKDTLMISRTPEVTCVVVDVSHEDPEVKFNWYVDGVEVHNAKTKPREEQYNSTYRVVSVLTVLHQDWLNGKEYKCKVSNKALPAPIEKTISKAKGQPREPQVYTLPPSRDELTKNQVSLTCLVKGFYPSDIAVEWESNGQPENNYKTTPPVLDSDGSFFLYSKLTVDKSRWQQGNVFSCSVMHEALHNHYTQKSLSLSPG

SEQ ID NO: 336 - protein, 212 aa, Artificial Sequence
  Synthetic
ELTQSPSSLSASVGDRVTITCRASQSISSYLNWYQQKPGKAPKLLIYAASSLQSGVPSRFSGSGSGTDFTLTISSLQPEDFATYYCQQSYSTPPTFGQGTKVEIKRTVAAPSVFIFPPSDEQLKSGTASVVCLLNNFYPREAKVQWKVDNALQSGNSQESVTEQDSKDSTYSLSSTLTLSKADYEKHKVYACEVTHQGLSSPVTKSFNRGEC

SEQ ID NO: 337 - protein, 268 aa, Artificial Sequence
  Synthetic
EVQLVESGGGLVQPGGSLRLSCAASGFTFSDHYMDWVRQAPGKGLEWVGRTRNKANSYTTEYAASVKGRFTISRDDSKNSLYLQMNSLKTEDTAVYYCAKGLTPLYFDYWGQGTLVTVASTKGPSVFPLAPSSKSTSGGTAALGCLVKDYFPEPVTVSWNSGALTSGVHTFPAVLQSSGLYSLSSVVTVPSSSLGTQTYICNVNHKPSNTKVDKKVEPKSCDKTHTKKKPLDGEYFTLQIRGRERFEMFRELNEALELKDAQAGKEPG

SEQ ID NO: 338 - protein, 485 aa, Artificial Sequence
  Synthetic
EVQLVESGGGLVQPGGSLRLSCAASGFTFSDHYMDWVRQAPGKGLEWVGRTRNKANSYTTEYAASVKGRFTISRDDSKNSLYLQMNSLKTEDTAVYYCAKGLTPLYFDYWGQGTLVTVASTKGPSVFPLAPSSKSTSGGTAALGCLVKDYFPEPVTVSWNSGALTSGVHTFPAVLQSSGLYSLSSVVTVPSSSLGTQTYICNVNHKPSNTKVDKKVEPKSCDKTHTAPELLGGPSVFLFPPKPKDTLMISRTPEVTCVVVDVSHEDPEVKFNWYVDGVEVHNAKTKPREEQYNSTYRVVSVLTVLHQDWLNGKEYKCKVSNKALPAPIEKTISKAKGQPREPQVYTLPPSRDELTKNQVSLTCLVKGFYPSDIAVEWESNGQPENNYKTTPPVLDSDGSFFLYSKLTVDKSRWQQGNVFSCSVMHEALHNHYTQKSLSLSPGKKKKPLDGEYFTLQIRGRERFEMFRELNEALELKDAQAGKEPG

SEQ ID NO: 339 - protein, 490 aa, Artificial Sequence
  Synthetic
EVQLVESGGGLVQPGGSLRLSCAASGFTFSDHYMDWVRQAPGKGLEWVGRTRNKANSYTTEYAASVKGRFTISRDDSKNSLYLQMNSLKTEDTAVYYCAKGLTPLYFDYWGQGTLVTVASTKGPSVFPLAPSSKSTSGGTAALGCLVKDYFPEPVTVSWNSGALTSGVHTFPAVLQSSGLYSLSSVVTVPSSSLGTQTYICNVNHKPSNTKVDKKVEPKSCDKTHTCPPCPAPELLGGPSVFLFPPKPKDTLMISRTPEVTCVVVDVSHEDPEVKFNWYVDGVEVHNAKTKPREEQYNSTYRVVSVLTVLHQDWLNGKEYKCKVSNKALPAPIEKTISKAKGQPREPQVYTLPPSRDELTKNQVSLTCLVKGFYPSDIAVEWESNGQPENNYKTTPPVLDSDGSFFLYSKLTVDKSRWQQGNVFSCSVMHEALHNHYTQKSLSLSPGKKKKPLDGEYFTLQIRGRERFEMFRELNEALELKDAQAGKEPG

SEQ ID NO: 340 - protein, 238 aa, Artificial Sequence
  Synthetic
EVQLVESGGGLVQPGGSLRLSCAASGFTFSDHYMDWVRQAPGKGLEWVGRTRNKANSYTTEYAASVKGRFTISRDDSKNSLYLQMNSLKTEDTAVYYCAKGLTPLYFDYWGQGTLVTVGGGGSGGGGSGGGGSELTQSPSSLSASVGDRVTITCRASQSISSYLNWYQQKPGKAPKLLIYAASSLQSGVPSRFSGSGSGTDFTLTISSLQPEDFATYYCQQSYSTPPTFGQGTKVEIK

SEQ ID NO: 341 - protein, 280 aa, Artificial Sequence
  Synthetic
EVQLVESGGGLVQPGGSLRLSCAASGFTFSDHYMDWVRQAPGKGLEWVGRTRNKANSYTTEYAASVKGRFTISRDDSKNSLYLQMNSLKTEDTAVYYCAKGLTPLYFDYWGQGTLVTVGGGGSGGGGSGGGGSELTQSPSSLSASVGDRVTITCRASQSISSYLNWYQQKPGKAPKLLIYAASSLQSGVPSRFSGSGSGTDFTLTISSLQPEDFATYYCQQSYSTPPTFGQGTKVEIKKKKPLDGEYFTLQIRGRERFEMFRELNEALELKDAQAGKEPG

SEQ ID NO: 342 - protein, 507 aa, Artificial Sequence
  Synthetic
EVQLVESGGGLVQPGGSLRLSCAASGFTFSDHYMDWVRQAPGKGLEWVGRTRNKANSYTTEYAASVKGRFTISRDDSKNSLYLQMNSLKTEDTAVYYCAKGLTPLYFDYWGQGTLVTVGGGGSGGGGSGGGGSELTQSPSSLSASVGDRVTITCRASQSISSYLNWYQQKPGKAPKLLIYAASSLQSGVPSRFSGSGSGTDFTLTISSLQPEDFATYYCQQSYSTPPTFGQGTKVEIKEPKSCDKTHTAPELLGGPSVFLFPPKPKDTLMISRTPEVTCVVVDVSHEDPEVKFNWYVDGVEVHNAKTKPREEQYNSTYRVVSVLTVLHQDWLNGKEYKCKVSNKALPAPIEKTISKAKGQPREPQVYTLPPSRDELTKNQVSLTCLVKGFYPSDIAVEWESNGQPENNYKTTPPVLDSDGSFFLYSKLTVDKSRWQQGNVFSCSVMHEALHNHYTQKSLSLSPGKKKKPLDGEYFTLQIRGRERFEMFRELNEALELKDAQAGKEPG

SEQ ID NO: 343 - protein, 447 aa, Artificial Sequence
  Synthetic
EVQLVESGGGLVQPGGSLRLSCAASGFTFSDHYMDWVRQAPGKGLEWVGRTRNKANSYTTEYAASVKGRFTISRDDSKNSLYLQMNSLKTEDTAVYYCARGISPFYFDYWGQGTLVTVASTKGPSVFPLAPSSKSTSGGTAALGCLVKDYFPEPVTVSWNSGALTSGVHTFPAVLQSSGLYSLSSVVTVPSSSLGTQTYICNVNHKPSNTKVDKKVEPKSCDKTHTCPPCPAPELLGGPSVFLFPPKPKDTLMISRTPEVTCVVVDVSHEDPEVKFNWYVDGVEVHNAKTKPREEQYNSTYRVVSVLTVLHQDWLNGKEYKCKVSNKALPAPIEKTISKAKGQPREPQVYTLPPSRDELTKNQVSLTCLVKGFYPSDIAVEWESNGQPENNYKTTPPVLDSDGSFFLYSKLTVDKSRWQQGNVFSCSVMHEALHNHYTQKSLSLSPG

SEQ ID NO: 344 - protein, 212 aa, Artificial Sequence; identical to SEQ ID NO: 336
  Synthetic

SEQ ID NO: 345 - protein, 268 aa, Artificial Sequence
  Synthetic
EVQLVESGGGLVQPGGSLRLSCAASGFTFSDHYMDWVRQAPGKGLEWVGRTRNKANSYTTEYAASVKGRFTISRDDSKNSLYLQMNSLKTEDTAVYYCARGISPFYFDYWGQGTLVTVASTKGPSVFPLAPSSKSTSGGTAALGCLVKDYFPEPVTVSWNSGALTSGVHTFPAVLQSSGLYSLSSVVTVPSSSLGTQTYICNVNHKPSNTKVDKKVEPKSCDKTHTKKKPLDGEYFTLQIRGRERFEMFRELNEALELKDAQAGKEPG

SEQ ID NO: 346 - protein, 485 aa, Artificial Sequence
  Synthetic
EVQLVESGGGLVQPGGSLRLSCAASGFTFSDHYMDWVRQAPGKGLEWVGRTRNKANSYTTEYAASVKGRFTISRDDSKNSLYLQMNSLKTEDTAVYYCARGISPFYFDYWGQGTLVTVASTKGPSVFPLAPSSKSTSGGTAALGCLVKDYFPEPVTVSWNSGALTSGVHTFPAVLQSSGLYSLSSVVTVPSSSLGTQTYICNVNHKPSNTKVDKKVEPKSCDKTHTAPELLGGPSVFLFPPKPKDTLMISRTPEVTCVVVDVSHEDPEVKFNWYVDGVEVHNAKTKPREEQYNSTYRVVSVLTVLHQDWLNGKEYKCKVSNKALPAPIEKTISKAKGQPREPQVYTLPPSRDELTKNQVSLTCLVKGFYPSDIAVEWESNGQPENNYKTTPPVLDSDGSFFLYSKLTVDKSRWQQGNVFSCSVMHEALHNHYTQKSLSLSPGKKKKPLDGEYFTLQIRGRERFEMFRELNEALELKDAQAGKEPG

SEQ ID NO: 347 - protein, 490 aa, Artificial Sequence
  Synthetic
EVQLVESGGGLVQPGGSLRLSCAASGFTFSDHYMDWVRQAPGKGLEWVGRTRNKANSYTTEYAASVKGRFTISRDDSKNSLYLQMNSLKTEDTAVYYCARGISPFYFDYWGQGTLVTVASTKGPSVFPLAPSSKSTSGGTAALGCLVKDYFPEPVTVSWNSGALTSGVHTFPAVLQSSGLYSLSSVVTVPSSSLGTQTYICNVNHKPSNTKVDKKVEPKSCDKTHTCPPCPAPELLGGPSVFLFPPKPKDTLMISRTPEVTCVVVDVSHEDPEVKFNWYVDGVEVHNAKTKPREEQYNSTYRVVSVLTVLHQDWLNGKEYKCKVSNKALPAPIEKTISKAKGQPREPQVYTLPPSRDELTKNQVSLTCLVKGFYPSDIAVEWESNGQPENNYKTTPPVLDSDGSFFLYSKLTVDKSRWQQGNVFSCSVMHEALHNHYTQKSLSLSPGKKKKPLDGEYFTLQIRGRERFEMFRELNEALELKDAQAGKEPG

SEQ ID NO: 348 - protein, 238 aa, Artificial Sequence
  Synthetic
EVQLVESGGGLVQPGGSLRLSCAASGFTFSDHYMDWVRQAPGKGLEWVGRTRNKANSYTTEYAASVKGRFTISRDDSKNSLYLQMNSLKTEDTAVYYCARGISPFYFDYWGQGTLVTVGGGGSGGGGSGGGGSELTQSPSSLSASVGDRVTITCRASQSISSYLNWYQQKPGKAPKLLIYAASSLQSGVPSRFSGSGSGTDFTLTISSLQPEDFATYYCQQSYSTPPTFGQGTKVEIK

SEQ ID NO: 349 - protein, 280 aa, Artificial Sequence
  Synthetic
EVQLVESGGGLVQPGGSLRLSCAASGFTFSDHYMDWVRQAPGKGLEWVGRTRNKANSYTTEYAASVKGRFTISRDDSKNSLYLQMNSLKTEDTAVYYCARGISPFYFDYWGQGTLVTVGGGGSGGGGSGGGGSELTQSPSSLSASVGDRVTITCRASQSISSYLNWYQQKPGKAPKLLIYAASSLQSGVPSRFSGSGSGTDFTLTISSLQPEDFATYYCQQSYSTPPTFGQGTKVEIKKKKPLDGEYFTLQIRGRERFEMFRELNEALELKDAQAGKEPG

SEQ ID NO: 350 - protein, 507 aa, Artificial Sequence
  Synthetic
EVQLVESGGGLVQPGGSLRLSCAASGFTFSDHYMDWVRQAPGKGLEWVGRTRNKANSYTTEYAASVKGRFTISRDDSKNSLYLQMNSLKTEDTAVYYCARGISPFYFDYWGQGTLVTVGGGGSGGGGSGGGGSELTQSPSSLSASVGDRVTITCRASQSISSYLNWYQQKPGKAPKLLIYAASSLQSGVPSRFSGSGSGTDFTLTISSLQPEDFATYYCQQSYSTPPTFGQGTKVEIKEPKSCDKTHTAPELLGGPSVFLFPPKPKDTLMISRTPEVTCVVVDVSHEDPEVKFNWYVDGVEVHNAKTKPREEQYNSTYRVVSVLTVLHQDWLNGKEYKCKVSNKALPAPIEKTISKAKGQPREPQVYTLPPSRDELTKNQVSLTCLVKGFYPSDIAVEWESNGQPENNYKTTPPVLDSDGSFFLYSKLTVDKSRWQQGNVFSCSVMHEALHNHYTQKSLSLSPGKKKKPLDGEYFTLQIRGRERFEMFRELNEALELKDAQAGKEPG

SEQ ID NO: 351 - protein, 446 aa, Artificial Sequence
  Synthetic
QMQLVQSGTEVKKPGESLKISCKGSGYGFITYWIGWVRQMPGKGLEWMGIIYPGDSETRYSPSFQGQVTISADKSINTAYLQWSSLKASDTAIYYCAGGSGISTPMDVWGQGTTVTVASTKGPSVFPLAPSSKSTSGGTAALGCLVKDYFPEPVTVSWNSGALTSGVHTFPAVLQSSGLYSLSSVVTVPSSSLGTQTYICNVNHKPSNTKVDKKVEPKSCDKTHTCPPCPAPELLGGPSVFLFPPKPKDTLMISRTPEVTCVVVDVSHEDPEVKFNWYVDGVEVHNAKTKPREEQYNSTYRVVSVLTVLHQDWLNGKEYKCKVSNKALPAPIEKTISKAKGQPREPQVYTLPPSRDELTKNQVSLTCLVKGFYPSDIAVEWESNGQPENNYKTTPPVLDSDGSFFLYSKLTVDKSRWQQGNVFSCSVMHEALHNHYTQKSLSLSPG

SEQ ID NO: 352 - protein, 220 aa, Artificial Sequence; identical to SEQ ID NO: 228
  Synthetic

SEQ ID NO: 353 - protein, 267 aa, Artificial Sequence; identical to SEQ ID NO: 225
  Synthetic

SEQ ID NO: 354 - protein, 484 aa, Artificial Sequence; identical to SEQ ID NO: 226
  Synthetic

SEQ ID NO: 355 - protein, 489 aa, Artificial Sequence; identical to SEQ ID NO: 227
  Synthetic

SEQ ID NO: 356 - protein, 244 aa, Artificial Sequence
  Synthetic
QMQLVQSGTEVKKPGESLKISCKGSGYGFITYWIGWVRQMPGKGLEWMGIIYPGDSETRYSPSFQGQVTISADKSINTAYLQWSSLKASDTAIYYCAGGSGISTPMDVWGQGTTVTVGGGGSGGGGSGGGGSDIQLTQSPDSLAVSLGERATINCKSSQSVLYSSINKNYLAWYQQKPGQPPKLLIYWASTRESGVPDRFSGSGSGTDFTLTISSLQAEDVAVYYCQQYSTPYTFGQGTKVEIK

SEQ ID NO: 357 - protein, 287 aa, Artificial Sequence
  Synthetic
QMQLVQSGTEVKKPGESLKISCKGSGYGFITYWIGWVRQMPGKGLEWMGIIYPGDSETRYSPSFQGQVTISADKSINTAYLQWSSLKASDTAIYYCAGGSGISTPMDVWGQGTTVTVGGGGSGGGGSGGGGSDIQLTQSPDSLAVSLGERATINCKSSQSVLYSSINKNYLAWYQQKPGQPPKLLIYWASTRESGVPDRFSGSGSGTDFTLTISSLQAEDVAVYYCQQYYSTPYTFGQGTKVEIKKKKPLDGEYFTLQIRGRERFEMFRELNEALELKDAQAGKEPG

SEQ ID NO: 358 - protein, 513 aa, Artificial Sequence
  Synthetic
QMQLVQSGTEVKKPGESLKISCKGSGYGFITYWIGWVRQMPGKGLEWMGIIYPGDSETRYSPSFQGQVTISADKSINTAYLQWSSLKASDTAIYYCAGGSGISTPMDVWGQGTTVTVGGGGSGGGGSGGGGSDIQLTQSPDSLAVSLGERATINCKSSQSVLYSSINKNYLAWYQQKPGQPPKLLIYWASTRESGVPDRFSGSGSGTDFTLTISSLQAEDVAVYYCQQYSTPYTFGQGTKVEIKEPKSCDKTHTAPELLGGPSVFLFPPKPKDTLMISRTPEVTCVVVDVSHEDPEVKFNWYVDGVEVHNAKTKPREEQYNSTYRVVSVLTVLHQDWLNGKEYKCKVSNKALPAPIEKTISKAKGQPREPQVYTLPPSRDELTKNQVSLTCLVKGFYPSDIAVEWESNGQPENNYKTTPPVLDSDGSFFLYSKLTVDKSRWQQGNVFSCSVMHEALHNHYTQKSLSLSPGKKKKPLDGEYFTLQIRGRERFEMFRELNEALELKDAQAGKEPG

SEQ ID NO: 359 - protein, 127 aa, Artificial Sequence
  Synthetic
QVQLQESGGGLVQTGGSLRLSCAASGSDFSSYAMAWFRQAPGKEREFVASISRRSTNTYYRNSVKGRFTISRDNAKNTAWLQMNSLKPEDTAVYYCAADRARYGSSWYESLAYLEVWGQGTQVTVSS

SEQ ID NO: 360 - protein, 36 aa, Artificial Sequence
  Synthetic
SLDQINVTFLDLEYEMKKLEEAIKKLEESYIDLKEL

SEQ ID NO: 361 - protein, 177 aa, Artificial Sequence
  Synthetic
QVQLQESGGGLVQAGGSLRLSCAASGRTFSEYAMGWFRQAPGKEREFVATISWSGGSTYYTDSVKGRFTISRDNAKNTVYLQMNSLKPDDTAVYYCAAAGLGTVVSEWDYDYDYWGQGTQVTVSSGGGGSGGGGSKKKPLDGEYFTLQIRGRERFEMFRELNEALELKDAQAGKEPG

SEQ ID NO: 362 - protein, 367 aa, Artificial Sequence
  Synthetic
QVQLQESGGGLVQAGGSLRLSCAASGRTFSEYAMGWFRQAPGKEREFVATISWSGGSTYYTDSVKGRFTISRDNAKNTVYLQMNSLKPDDTAVYYCAAAGLGTVVSEWDYDYDYWGQGTQVTVSSGGGGSGGGGSEPKSCDKTHTCPPCPAPELLGGPSVFLFPPKPKDTLMISRTPEVTCVVVDVSHEDPEVKFNWYVDGVEVHNAKTKPREEQYNSTYRVVSVLTVLHQDWLNGKEYKCKVSNKALPAPIEKTISKAKGQPREPQVYTLPPSRDELTKNQVSLTCLVKGFYPSDIAVEWESNGQPENNYKTTPPVLDSDGSFFLYSKLTVDKSRWQQGNVFSCSVMHEALHNHYTQKSLSLSPGK

SEQ ID NO: 363 - protein, 409 aa, Artificial Sequence
  Synthetic
QVQLQESGGGLVQAGGSLRLSCAASGRTFSEYAMGWFRQAPGKEREFVATISWSGGSTYYTDSVKGRFTISRDNAKNTVYLQMNSLKPDDTAVYYCAAAGLGTVVSEWDYDYDYWGQGTQVTVSSGGGGSGGGGSEPKSCDKTHTCPPCPAPELLGGPSVFLFPPKPKDTLMISRTPEVTCVVVDVSHEDPEVKFNWYVDGVEVHNAKTKPREEQYNSTYRVVSVLTVLHQDWLNGKEYKCKVSNKALPAPIEKTISKAKGQPREPQVYTLPPSRDELTKNQVSLTCLVKGFYPSDIAVEWESNGQPENNYKTTPPVLDSDGSFFLYSKLTVDKSRWQQGNVFSCSVMHEALHNHYTQKSLSLSPGKKKKPLDGEYFTLQIRGRERFEMFRELNEALELKDAQAGKEPG

SEQ ID NO: 364 - protein, 465 aa, Artificial Sequence
  Synthetic
QVQLQESGGGLVQAGGSLRLSCAASGRTFSEYAMGWFRQAPGKEREFVATISWSGGSTYYTDSVKGRFTISRDNAKNTVYLQMNSLKPDDTAVYYCAAAGLGTVVSEWDYDYDYWGQGTQVTVSSGGGGSGGGGSASTKGPSVFPLAPSSKSTSGGTAALGCLVKDYFPEPVTVSWNSGALTSGVHTFPAVLQSSGLYSLSSVVTVPSSSLGTQTYICNVNHKPSNTKVDKKVEPKSCDKTHTCPPCPAPELLGGPSVFLFPPKPKDTLMISRTPEVTCVVVDVSHEDPEVKFNWYVDGVEVHNAKTKPREEQYNSTYRVVSVLTVLHQDWLNGKEYKCKVSNKALPAPIEKTISKAKGQPREPQVYTLPPSRDELTKNQVSLTCLVKGFYPSDIAVEWESNGQPENNYKTTPPVLDSDGSFFLYSKLTVDKSRWQQGNVFSCSVMHEALHNHYTQKSLSLSPGK

SEQ ID NO: 365 - protein, 507 aa, Artificial Sequence
  Synthetic
QVQLQESGGGLVQAGGSLRLSCAASGRTFSEYAMGWFRQAPGKEREFVATISWSGGSTYYTDSVKGRFTISRDNAKNTVYLQMNSLKPDDTAVYYCAAAGLGTVVSEWDYDYDYWGQGTQVTVSSGGGGSGGGGSASTKGPSVFPLAPSSKSTSGGTAALGCLVKDYFPEPVTVSWNSGALTSGVHTFPAVLQSSGLYSLSSVVTVPSSSLGTQTYICNVNHKPSNTKVDKKVEPKSCDKTHTCPPCPAPELLGGPSVFLFPPKPKDTLMISRTPEVTCVVVDVSHEDPEVKFNWYVDGVEVHNAKTKPREEQYNSTYRVVSVLTVLHQDWLNGKEYKCKVSNKALPAPIEKTISKAKGQPREPQVYTLPPSRDELTKNQVSLTCLVKGFYPSDIAVEWESNGQPENNYKTTPPVLDSDGSFFLYSKLTVDKSRWQQGNVFSCSVMHEALHNHYTQKSLSLSPGKKKKPLDGEYFTLQIRGRERFEMFRELNEALELKDAQAGKEPG

SEQ ID NO: 366 - protein, 285 aa, Artificial Sequence
  Synthetic
QVQLQESGGGLVQAGGSLRLSCAASGRTFSEYAMGWFRQAPGKEREFVATISWSGGSTYYTDSVKGRFTISRDNAKNTVYLQMNSLKPDDTAVYYCAAAGLGTVVSEWDYDYDYWGQGTQVTVSSGGGGSGGGGSASTKGPSVFPLAPSSKSTSGGTAALGCLVKDYFPEPVTVSWNSGALTSGVHTFPAVLQSSGLYSLSSVVTVPSSSLGTQTYICNVNHKPSNTKVDKKVEPKSCDKTHTKKKPLDGEYFTLQIRGRERFEMFRELNEALELKDAQAGKEPG

SEQ ID NO: 367 - protein, 502 aa, Artificial Sequence
  Synthetic
QVQLQESGGGLVQAGGSLRLSCAASGRTFSEYAMGWFRQAPGKEREFVATISWSGGSTYYTDSVKGRFTISRDNAKNTVYLQMNSLKPDDTAVYYCAAAGLGTVVSEWDYDYDYWGQGTQVTVSSGGGGSGGGGSASTKGPSVFPLAPSSKSTSGGTAALGCLVKDYFPEPVTVSWNSGALTSGVHTFPAVLQSSGLYSLSSVVTVPSSSLGTQTYICNVNHKPSNTKVDKKVEPKSCDKTHTAPELLGGPSVFLFPPKPKDTLMISRTPEVTCVVVDVSHEDPEVKFNWYVDGVEVHNAKTKPREEQYNSTYRVVSVLTVLHQDWLNGKEYKCKVSNKALPAPIEKTISKAKGQPREPQVYTLPPSRDELTKNQVSLTCLVKGFYPSDIAVEWESNGQPENNYKTTPPVLDSDGSFFLYSKLTVDKSRWQQGNVFSCSVMHEALHNHYTQKSLSLSPGKKKKPLDGEYFTLQIRGRERFEMFRELNEALELKDAQAGKEPG

SEQ ID NO: 368 - protein, 199 aa, Artificial Sequence
  Synthetic
QVQLQESGGGLVQAGGSLRLSCAASGRTFSEYAMGWFRQAPGKEREFVATISWSGGSTYYTDSVKGRFTISRDNAKNTVYLQMNSLKPDDTAVYYCAAAGLGTVVSEWDYDYDYWGQGTQVTVSSGGGGSGGGGSEPKSCDKTHTCPPCPAPELLGGKKKPLDGEYFTLQIRGRERFEMFRELNEALELKDAQAGKEPG

SEQ ID NO: 369 - protein, 297 aa, Artificial Sequence
  Synthetic
QVQLQESGGGLVQAGGSLRLSCAASGRTFSEYAMGWFRQAPGKEREFVATISWSGGSTYYTDSVKGRFTISRDNAKNTVYLQMNSLKPDDTAVYYCAAAGLGTVVSEWDYDYDYWGQGTQVTVSSGGGGSGGGGSASTKGPSVFPLAPSSKSTSGGTAALGCLVKDYFPEPVTVSWNSGALTSGVHTFPAVLQSSGLYSLSSVVTVPSSSLGTQTYICNVNHKPSNTKVDKKVEPKSCDKTHTCPPCPAPELLGGKKKPLDGEYFTLQIRGRERFEMFRELNEALELKDAQAGKEPG

SEQ ID NO: 370 - protein, 114 aa, Artificial Sequence
  Synthetic
QVQLVESGGGLVQAGGSLRLSCAASGFPVRKANMHWYRQAPGKEREWVAAIMSKGEQTVYADSVEGRFTISRDNAKNTVYLQMNSLKPEDTAVYYCRVFVGWHYFGQGTQVTVS

SEQ ID NO: 371 - protein, 115 aa, Artificial Sequence
  Synthetic
QVQLVESGGGLVQAGGSLRLSCATSGFPVYQANMHWYRQAPGKEREWVAAIQSYGDGTHYADSVKGRFTISRDNAKNTVYLQMNSLKPEDTAVYYCRAVYVGMHYFGQGTQVTVS

SEQ ID NO: 372 - protein, 114 aa, Artificial Sequence
  Synthetic
QVQLVESGGGLVQAGGSLRLSCAASGFPVNYKTMWWYRQAPGKEREWVAAIWSYGHTTHYADSVKGRFTISRDNAKNTVYLQMNSLKPEDTAVYYCVVWVGHNYEGQGTQVTVS

SEQ ID NO: 373 - protein, 114 aa, Artificial Sequence
  Synthetic
QVQLVESGGGLVQAGGSLRLSCAASGFPVYAQNMHWYRQAPGKEREWVAAIYSHGYWTLYADSVKGRFTISRDNAKNTVYLQMNSLKPEDTAVYYCEVQVGAWYTGQGTQVTVS

SEQ ID NO: 374 - protein, 114 aa, Artificial Sequence
  Synthetic
QVQLVESGGGLVQAGGSLRLSCAASGFPVFSGHMHWYRQAPGKEREWVAAILSNGDSTHYADSVKGRFTISRDNAKNTVYLQMNSLKPEDTAVYYCRVHVGAHYFGQGTQVTVS

SEQ ID NO: 375 - protein, 114 aa, Artificial Sequence
  Synthetic
QVQLVESGGGLVQAGGSLRLSCAASGFPVEQGRMYWYRQAPGKEREWVAAIISHGTVTVYADSVKGRFTISRDNAKNTVYLQMNSLKPEDTAVYYCYVYVGAQYWGQGTQVTVS

SEQ ID NO: 376 - protein, 114 aa, Artificial Sequence
  Synthetic
QVQLVESGGGLVQAGGSLRLSCAASGFPVLFTYMHWYRQAPGKEREWVAAIWSSGNSTWYADSVKGRFTISRDNAKNTVYLQMNSLKPEDTAVYYCFVKVGNWYAGQGTQVTVS

SEQ ID NO: 377 - protein, 114 aa, Artificial Sequence
  Synthetic
QVQLVESGGGLVQAGGSLRLSCAASGFPVNAGNMHWYRQAPGKEREWVAAIQSYGRTTYYADSVKGRFTISRDNAKNTVYLQMNSLKPEDTAVYYCRVFVGMHYFGQGTQVTVS

SEQ ID NO: 378 - protein, 114 aa, Artificial Sequence
  Synthetic
QVQLVESGGGLVQAGGSLRLSCAASGFPVSSSTMTWYRQAPGKEREWVAAINSYGWETHYADSVKGRFTISRDNAKNTVYLQMNSLKPEDTAVYYCYVYVGGSYIGQGTQVTVS

SEQ ID NO: 379 - protein, 114 aa, Artificial Sequence
  Synthetic
QVQLVESGGGLVQAGGSLRLSCAASGFPVQSHYMRWYRQAPGKEREWVAAIESTGHHTAYADSVKGRFTISRDNAKNTVYLQMNSLKPEDTAVYYCTVYVGYEYHGQGTQVTVS

SEQ ID NO: 380 - protein, 114 aa, Artificial Sequence
  Synthetic
QVQLVESGGGLVQAGGSLRLSCAASGFPVETENMHWYRQAPGKEREWVAAIYSHGMWTAYADSVKGRFTISRDNTKNTVYLQMNSLKPEDTAVYYCEVEVGKWYFGQGTQVTVS

SEQ ID NO: 381 - protein, 114 aa, Artificial Sequence
  Synthetic
QVQLVESGGGLVQAGGSLRLSCAASGFPVKASRMYWYRQAPGKEREWVAAIQSFGEVTWYADSVKGRFTISRDNAKNTVYLQMNSLKPEDTAVYYCYVWVGQEYWGQGTQVTVS

SEQ ID NO: 382 - protein, 114 aa, Artificial Sequence
  Synthetic
QVQLVESGGGLVQAGGSLRLSCAASGFPVYASNMHWYRQAPGKEREWVAAIESQGYMTAYADSVKGRFTISRDNAKNTVYLQMNSLKPEDTAVYYCWVIVGEYYVGQGTQVTVS

SEQ ID NO: 383 - protein, 114 aa, Artificial Sequence
  Synthetic
QVQLVESGGGLVQAGGSLRLSCAASGFPVQAREMEWYRQAPGKEREWVAAIKSTGTYTAYAYSVKGRFTISRDNAKNTVYLQMNSLKPEDTAVYYCYVYVGSSYIGQGTQVTVS

SEQ ID NO: 384 - protein, 114 aa, Artificial Sequence
  Synthetic
QVQLVESGGGLVQAGGSLRLSCAASGFPVKNFEMEWYRKAPGKEREWVAAIQSGGVETYYADSVKGRFTISRDNAKNTVYLQMNSLKPEDTAVYYCFVYVGRSYIGQGTQVTVS

SEQ ID NO: 385 - protein, 115 aa, Artificial Sequence
  Synthetic
QVQLVESGGGLVQAGGSLRLSCAASGFPVAYKTMWWYRQAPGKEREWVAAIESYGIKWTRYADSVKGRFTISRDNAKNTVYLQMNSLKPEDTAVYYCIVWVGAQYHGQGTQVTVS

SEQ ID NO: 386 - protein, 114 aa, Artificial Sequence
  Synthetic
QVQLVESGGGLVQAGGSLRLSCAASGFPVAGRNMWWYRQAPGKEREWVAAIYSSGTYTEYADSVKGRFTISRDNAKNTVYLQMNSLKPEDTAVYYCHVWVGSLYKGQGTQVTVS

SEQ ID NO: 387 - protein, 114 aa, Artificial Sequence
  Synthetic
QVQLVESGGGLVQAGGSLRLSCAASGFPVKHARMWWYRQAPGKEREWVAAIDSHGDTTWYADSVKGRFTISRDNAKNTVYLQMNSLKPEDTAVYYCYVYVGASYWGQGTQVTVS

SEQ ID NO: 388 - protein, 114 aa, Artificial Sequence
  Synthetic
QVQLVESGGGLVQAGGSLRLSCAASGFPVNSHEMTWYRQAPGKEREWVAAIQSTGTVTEYADSVKGRFTISRDNAKNTVYLQMNSLKPEDTAVYYCYVYVGSSYLGQGTQVTVS

SEQ ID NO: 389 - protein, 114 aa, Artificial Sequence
  Synthetic
QVQLVESGGGLVQAGGSLRLSCAASGFPVEQREMEWYRQAPGKEREWVAAIDSNGNYTFYADSVKGRFTISRDNAKNTVYLQMNSLKPEDTAVYYCYVYVGKSYIGQGTQVTVS

SEQ ID NO: 390 - protein, 114 aa, Artificial Sequence
  Synthetic
QVQLVESGGGLVQAGGSLRLSCAASGFPVKHHWMFWYRQAPGKEREWVAAIKSYGYGTEYADSVKGRFTISRDNAKNTVYLQMNSLKPEDTAVYYCFVGVGTHYAGQGTQVTVS

SEQ ID NO: 391 - protein, 114 aa, Artificial Sequence
  Synthetic
QVQLVESGGGLVQAGGSLRLSCAASGFPVYAAEMEWYRQAPGKEREWVAAISSQGTITYYADSVKGRFTISRDNAKNTVYLQMNSLKPEDTAVYYCFVYVGKSYIGQGTQVSVS

SEQ ID NO: 392 - protein, 120 aa, Artificial Sequence
  Synthetic
QVQLVESGGGLVQAGGSLRLSCAASGFPVHAWEMAWYRQAPGKEREWVAAIRSFGSSTHYADSVKGRFTISRDNAKNTVYLQMNSLKPEDTAVYYCNVKDFGTHHYAYDYWGQGTQVTVS

SEQ ID NO: 393 - protein, 120 aa, Artificial Sequence
  Synthetic
QVQLVESGGGLVQAGGSLRLSCAASGFPVNTWWMHWYRQAPGKEREWVAAITSWGFRTYYADSVKGRFTISRDNAKNTVYLQMNSLKPEDTAVYYCNVKDKGMAVQWYDYWGQGTQVTVS

SEQ ID NO: 394 - protein, 120 aa, Artificial Sequence
  Synthetic
QVQLVESGGGLVQAGGSLRLSCAASGFPVYHSTMFWYRQAPGKEREWVAAIYSSGQHTYYADSVKGRFTISRDNAKNTVYLQMNSLKPEDTAVYYCNVKDSGQWRQEYDYWGQGTQVTVS

SEQ ID NO: 395 - protein, 119 aa, Artificial Sequence
  Synthetic
QVQLVESGGGLVQAGGSLRLSCAASGFPVEHEMAWYRQAPGKEREWVAAIRSMGRKTLYADSVKGRFTISRDNAKNTVYLQMNSLKPEDTAVYYCNVKDFGYTWHEYDYWGQGTQVTVS

SEQ ID NO: 396 - protein, 120 aa, Artificial Sequence
  Synthetic
QVQLVESGGGLVQAGGSLRLSCAASGFPVTMAWMWWYRQAPGKEREWVAAIRSEGVRTYYADSVKGRFTISRDNAKNTVYLQMNSLKPEDTAVYYCNVKDYGQAHAYYDYWGQGTQVTVS

SEQ ID NO: 397 - protein, 120 aa, Artificial Sequence
  Synthetic
QVQLVESGGGLVQAGGSLRLSCAASGFPVNSHFMEWYRQAPGKEREWVAAIQHSSGFHTYYADSVKGRFTISRDNAKNTVYLQMNSLKPEDTAVYYCNVKDTGTTEDYDYWGQGTQVTVS

SEQ ID NO: 398 - protein, 120 aa, Artificial Sequence
  Synthetic
QVQLDESGGGLVQAGGSLRLSCAASGFPVYHAWMEWYRQAPGKEREWVAAITSSGRHTYYADSVKGRFTISRDNAKNTVYLQMNSLKPEDTAVYYCNVKDAGRVYNSYDYWGQGTQVTVS

SEQ ID NO: 399 - protein, 120 aa, Artificial Sequence
  Synthetic
QVQLVESGGGLVQAGGSLRLSCAASGFPVAHAWMEWYRQAPGKEREWVAAITSYGYKTYYADSVKGRFTISRDNAKNTVYLQMNSLKPEDTAVYYCNVKDTGTYRFYYDYWGQGTQVTVS

SEQ ID NO: 400 - protein, 119 aa, Artificial Sequence
  Synthetic
QVQLVESGGGLVQAGGSLRLSCAASGFPVWNQTMVWYRQAPGKEREWVAAIWSMGHTYYADSVKGRFTISRDNAKNTVYLQMNSLKPEDTAVYYCNVKDAGVYNRYYDYWGQGTQVTVS

SEQ ID NO: 401 - protein, 120 aa, Artificial Sequence
  Synthetic
QVQLVESGGGLVQAGGSLRLSCAASGFPVEHYWMEWYRQAPGKEREWVAAITSFGYRTYYADSVKGRFTISRDNAKNTVYLQMNSLKPEDTAVYYCNVKDWGFASHAYDYWGQGIQVTVS

SEQ ID NO: 402 - protein, 120 aa, Artificial Sequence
  Synthetic
QVQLVESGGGLVQAGGSLRLSCAASGFPEIAWEMAWYRQAPGKEREWVAAIRSFGERTLYADSVKGRFTISRDNAKNTVYLQMNSLKPEDTAVYYCNVKDFGWQHQEYDYWGQGTQVTVS

SEQ ID NO: 403 - protein, 120 aa, Artificial Sequence
  Synthetic
QVQLVESGGGLVQAGGSLRLSCAASGFPVYHAYMEWYRQAPGKEREWVAAIYSNGEHTYYADSVKGRFTISRDNAKNTVYLQMNSLKPEDTAVYYCNVKDSGSFNQAYDYWGQGTQVTVS

SEQ ID NO: 404 - protein, 120 aa, Artificial Sequence
  Synthetic
QVQLVESGGGLVQAGGSLRLSCAASGFPVEWSHMHWYRQAPGKEREWVAAIVSKGGYTLYADSVKGRFTISRDNAKNTVYLQMNSLKPEDTAVYYCNVKDYGVHFKRYDYWGQGTQVTVI

SEQ ID NO: 405 - protein, 120 aa, Artificial Sequence
  Synthetic
QVQLVESGGGLVQAGGSLRLSCAASGFPVFHVWMEWYRQAPGKEREWVAAIDSAGWHTYYADSVKGRFTISRDNAKNTVYLQMNSLKPEDTAVYYCNVKDAGNTTSAYDYWGQGTQVTVS

SEQ ID NO: 406 - protein, 120 aa, Artificial Sequence
  Synthetic
QVQLVESGGGLVQAGGSLRLSCAASGFPVYYNWMEWYRQAPGKEREWVAAIHSNGDETFYADSVKGRFTISRDNAKNTVYLQMNSLKPEDTAVYYCNVKDIDAEAYAYDYWGQGTQVTVS

SEQ ID NO: 407 - protein, 120 aa, Artificial Sequence
  Synthetic
QVQLVESGGGLVQAGGSLRLSCAASGFPVYHVWMEWYRQAPGKEREWVAAITSSGSHTYYADSVKGRFTISRDNAKNTVYLQMNSLKPEDTAVYYCNVKDSGQWRVQYDYWGQGTQVTVS

SEQ ID NO: 408 - protein, 120 aa, Artificial Sequence
  Synthetic
QVQLVESGGGLVQAGGSLRLSCAASGFPVYWHHMHWYRQAPGKEREWVAAIISWGWYTTYADSVKGRFTISRDNAKNTVYLQMNSLKPEDTAVYYCNVKDHGAQNQMYDYWGQGTQVTVS

SEQ ID NO: 409 - protein, 120 aa, Artificial Sequence
  Synthetic
QVQLVESGGGLVQAGGSLRLSCAASGFPVYRDRMAWYRQAPGKEREWVAAIYSAGQQTRYADSVKGRFTISRDNAKNTVYLQMNSLKPEDTAVYYCNVKDVGHHYEYYDYWGQGTQVTVS

SEQ ID NO: 410 - protein, 120 aa, Artificial Sequence
  Synthetic
QVQLVESGGGLVQAGGSLRLSCAASGFPVDNGYMHWYRQAPGKEREWVAAIDSYGWHTIYADSVKGRFTISRDNAKNTVYLQMNSLKPEDTAVYYCNVKDKGQMRAAYDYWGQGTQVTVS

SEQ ID NO: 411 - protein, 120 aa, Artificial Sequence
  Synthetic
QVQLVESGGGLVQAGGSLRLSCAASGFPVSWHSMYWYRQAPGKEREWVAAIFSEGDWTYYADSVKGRFTISRDNAKNTVYLQMNSLKPEDTAVYYCNVKDYGSSYYKYDYWGQGTQVTVS

SEQ ID NO: 412 - protein, 120 aa, Artificial Sequence
  Synthetic
QVQLVESGGGLVQAGGSLRLSCAASGFPVSQSVMAWYRQAPGKEREWVAAIYSKGQYTHYADSVKGRFTISRDNAKNTVYLQMNSLKPEDTAVYYCNVKDAGSSYWDYDYWGQGTQVTVS

SEQ ID NO: 413 - protein, 124 aa, Artificial Sequence
  Synthetic
QVQLVESGGGSVQAGGSLRLSCAASGSIGQIEYLGWFRQAPGKEREGVAALNTWTGRTYYADSVKGRFTVSLDNAKNTVYLQMNSLKPEDTALYYCAAARWGRTKPLNTYYYSYWGQGTPVTVS

SEQ ID NO: 414 - protein, 123 aa, Artificial Sequence
  Synthetic
QVQLVESGGGSVQAGGSLRLSCAASGYIDKIVYLGWFRQAPGKEREGVAALYTLSGHTYYADSVKGRFTVSLDNAKNTVYLQMNSLKPEDTALYYCAAATEGHAHALYRLHYYWGQGTQVTVS

SEQ ID NO: 415 - protein, 114 aa, Artificial Sequence
  Synthetic
QVQLVESGGGLVQAGGSLRLSCAASGFPVYQGEMHWYRQAPGKEREWVAAIRSTGVQTWYADSVKGRFTISRDNAKNTVYLQMNSLKPEDTAVYYCRVWVGTHYFGQGTQVTVS

SEQ ID NO: 416 - protein, 124 aa, Artificial Sequence
  Synthetic
QVQLVESGGGSVQAGGSLRLSCAASGNIQRIYYLGWFRQAPGKEREGVAALMTYTGHTYYADSVKGRFTVSLDNAKNTVYLQMNSLKPEDTALYYCAAAYVGAENPLPYSMYGYWGQGTQVTVS

SEQ ID NO: 417 - protein, 124 aa, Artificial Sequence
  Synthetic
QVQLVESGGGSVQAGGSLRLSCAASGQISHIKYLGWFRQAPGKEREGVAALITRWGQTYYADSVKGRFTVSLDNAKNTVYLQMNSLKPEDTALYYCAAADYGASDPLWFIHYLYWGQGTQVTVS

SEQ ID NO: 418 - protein, 124 aa, Artificial Sequence
  Synthetic
QVQLVESGGGSVQAGGSLRLSCAASGKIWTIKYLGWFRQAPGKEREGVAALMTRWGYTYYADSVKGRFTVSLDNAKNTVYLQMNSLKPEDTALYYCAAANYGSNFPLAEEDYWYWGQGTQVTVS

SEQ ID NO: 419 - protein, 125 aa, Artificial Sequence
  Synthetic
QVQLVESGGGSVQAGGSLRLSCAASGNISQIHYLGWFRQAPGKEREGVAALNTDYGYTYYADSVKGRFTVSLDNAKNTVYLQMNSLKPEDTALYYCAAAYYFGDDIPLWWEAYSYWGQGTQVTVS

SEQ ID NO: 420 - protein, 124 aa, Artificial Sequence
  Synthetic
QVQLVESGGGSVQAGGSLRLSCAASGNISTIEYLGWFRQAPGKEREGVAALYTWHGQTYYADSVKGRFTVSLDNAKNTVYLQMNSLKPEDTALYYCAAARWGRHMPLSATEYSYWGQGTQVTVS

SEQ ID NO: 421 - protein, 124 aa, Artificial Sequence
  Synthetic
QVQLVESGGGSVQAGGSLRLSCAASGNIESIYYLGWFRQAPGKEREGVAALWTGDGETYYADSVKGRFTVSLDNAKNTVYLQMNSLKPEDTALYYCAAAAWGNSAPLTTYRYYYWGQGTQVTVS

SEQ ID NO: 422 - protein, 124 aa, Artificial Sequence
  Synthetic
QVQLVESGGGSVQAGGSLRLSCAASGFIYGITYLGWFRQAPGKEREGVAALVTWNGQTYYADSVKGRFTVSLDNAKNTVYLQMNSLKPEDTALYYCAAADWGYDWPLWDEWYWYWGQGTQVTVS

SEQ ID NO: 423 - protein, 124 aa, Artificial Sequence
  Synthetic
QVQLVESGGGSVQAGGSLRLSCAASGTIADIKYLGWFRQAPGKEREGVAALMTRWGSTYYADSVKGRFTVSLDNAKNTVYLQMNSLKPEDTALYYCAAANYGANYPLYSQQYSYWGQGTQVTVS

SEQ ID NO: 424 - protein, 124 aa, Artificial Sequence
  Synthetic
QVQLVESGGGSVQAGGSLRLSCAASGSISSIKYLGWFRQAPGKEREGVAALMTRWGMTYYADSVKGRFTVSLDNAKNTVYLQMNSLKPEDTALYYCAAANYGANEPLQYTHYNYWGQGTQVTVS

SEQ ID NO: 425 - protein, 124 aa, Artificial Sequence
  Synthetic
QVQLVESGGGSVQAGGSLRLSCAASGEIESIFYLGWFRQAPGKEREGVAALYTYVGQTYYADSVKGRFTVSLDNAKNTVYLQMNSLKPEDTALYYCAAASYGAAHPLSIMRYYYWGQGTQVTVS

SEQ ID NO: 426 - protein, 124 aa, Artificial Sequence
  Synthetic
QVQLVESGGGSVQAGGSLRLSCAASGSIQAITYLGWFRQAPGKEREGVAALVTWNGQTYYADSVKGRFTVSLDNAKNTVYLQMNSLKPEDTALYYCAAADWGYDWPLWDEWYWYWGQGTQVTVS

SEQ ID NO: 427 - protein, 124 aa, Artificial Sequence
  Synthetic
QVQLVESGGGSVQAGGSLRLSCAASGSISSITYLGWFRQAPGKEREGVAALVTYSGNTYYADSVKGRFTVSLDNAKNTVYLQMNSLKPEDTALYYCAAATWGHSWPLYNDEYWYWGQGSQVTVS

SEQ ID NO: 428 - protein, 124 aa, Artificial Sequence
  Synthetic
QVQLVESGGGSVQAGGSLRLSCAASGSISSITYLGWFRQAPGKEREGVAALITVNGHTYYADSVKGRFTVSLDNAKNTVYLQMNSLKPEDTALYYCAAAAWGYAWPLHQDDYWYWGQGTQVTVS

SEQ ID NO: 429 - protein, 124 aa, Artificial Sequence
  Synthetic
QVQLVESGGGSVQAGGSLRLSCAASGSISSITYLGWFRQAPGKEREGVAALNTFNGTTYYADSVKGRFTVSLDNAKNTVYLQMNSLKPEDTALYYCAAATWGYSWPLIAEYNWYWGQGTQVTVS

SEQ ID NO: 430 - protein, 124 aa, Artificial Sequence
  Synthetic
QVQLVESGGGSVQAGGSLRLSCAASGSISSITYLGWFRQAPGKEREGVAALKTQAGFTYYADSVKGRFTVSLDNAKNTVYLQMNSLKPEDTALYYCAAANWGYSWPLYEADDWYWGQGTQVTVS

SEQ ID NO: 431 - protein, 120 aa, Artificial Sequence
  Synthetic
QVQLVESGGGLVQAGGSLRLSCAASGFPVYNTWMEWYRQAPGKEREWVAAITSHGYKTYYADSVKGRFTISRDNAKNTVYLQMNSLKPEDTAVYYCNVKDEGDMFTAYDYWGQGTQVTVS

SEQ ID NO: 432 - protein, 124 aa, Artificial Sequence
  Synthetic
QVQLVESGGGSVQAGGSLRLSCAASGTIAHIKYLGWFRQAPGKEREGVAALMTKWGQTYYADSVKGRFTVSLDNAKNTVYLQMNSLKPEDTALYYCAAASYGANFPLKASDYSYWGQGTQVTVS

SEQ ID NO: 433 - protein, 399 aa, Artificial Sequence
  Synthetic
QVQLVESGGGLVQAGGSLRLSCAASGFPVNYKTMWWYRQAPGKEREWVAAIWSYGHTTHYADSVKGRFTISRDNAKNTVYLQMNSLKPEDTAVYYCVVWVGHNYEGQGTQVTVSSGGGGSGGGGSEPKSCDKTHTCPPCPAPELLGGPSVFLFPPKPKDTLMISRTPEVTCVVVDVSHEDPEVKFNWYVDGVEVHNAKTKPREEQYNSTYRVVSVLTVLHQDWLNGKEYKCKVSNKALPAPIEKTISKAKGQPREPQVYTLPPSRDELTKNQVSLTCLVKGFYPSDIAVEWESNGQPENNYKTTPPVLDSDGSFFLYSKLTVDKSRWQQGNVFSCSVMHEALHNHYTQKSLSLSPGKKKKPLDGEYFTLQIRGRERFEMFRELNEALELKDAQAGKEPG

SEQ ID NO: 434 - protein, 399 aa, Artificial Sequence
  Synthetic
QVQLVESGGGLVQAGGSLRLSCAASGFPVQSHYMRWYRQAPGKEREWVAAIESTGHHTAYADSVKGRFTISRDNAKNTVYLQMNSLKPEDTAVYYCTVYVGYEYHGQGTQVTVSSGGGGSGGGGSEPKSCDKTHTCPPCPAPELLGGPSVFLFPPKPKDTLMISRTPEVTCVVVDVSHEDPEVKFNWYVDGVEVHNAKTKPREEQYNSTYRVVSVLTVLHQDWLNGKEYKCKVSNKALPAPIEKTISKAKGQPREPQVYTLPPSRDELTKNQVSLTCLVKGFYPSDIAVEWESNGQPENNYKTTPPVLDSDGSFFLYSKLTVDKSRWQQGNVFSCSVMHEALHNHYTQKSLSLSPGKKKKPLDGEYFTLQIRGRERFEMFRELNEALELKDAQAGKEPG

SEQ ID NO: 435 - protein, 405 aa, Artificial Sequence
  Synthetic
QVQLVESGGGLVQAGGSLRLSCAASGFPVYNTWMEWYRQAPGKEREWVAAITSHGYKTYYADSVKGRFTISRDNAKNTVYLQMNSLKPEDTAVYYCNVKDEGDMFTAYDYWGQGTQVTVSSGGGGSGGGGSEPKSCDKTHTCPPCPAPELLGGPSVFLFPPKPKDTLMISRTPEVTCVVVDVSHEDPEVKFNWYVDGVEVHNAKTKPREEQYNSTYRVVSVLTVLHQDWLNGKEYKCKVSNKALPAPIEKTISKAKGQPREPQVYTLPPSRDELTKNQVSLTCLVKGFYPSDIAVEWESNGQPENNYKTTPPVLDSDGSFFLYSKLTVDKSRWQQGNVFSCSVMHEALHNHYTQKSLSLSPGKKKKPLDGEYFTLQIRGRERFEMFRELNEALELKDAQAGKEPG

SEQ ID NO: 436 - protein, 409 aa, Artificial Sequence
  Synthetic
QVQLVESGGGSVQAGGSLRLSCAASGTIAHIKYLGWFRQAPGKEREGVAALMTKWGQTYYADSVKGRFTVSLDNAKNTVYLQMNSLKPEDTALYYCAAASYGANFPLKASDYSYWGQGTQVTVSSGGGGSGGGGSEPKSCDKTHTCPPCPAPELLGGPSVFLFPPKPKDTLMISRTPEVTCVVVDVSHEDPEVKFNWYVDGVEVHNAKTKPREEQYNSTYRVVSVLTVLHQDWLNGKEYKCKVSNKALPAPIEKTISKAKGQPREPQVYTLPPSRDELTKNQVSLTCLVKGFYPSDIAVEWESNGQPENNYKTTPPVLDSDGSFFLYSKLTVDKSRWQQGNVFSCSVMHEALHNHYTQKSLSLSPGKKKKPLDGEYFTLQIRGRERFEMFRELNEALELKDAQAGKEPG

SEQ ID NO: 437 - protein, 598 aa, Artificial Sequence
  Synthetic
QSTIEEQAKTFLDKFNHEAEDLFYQSSLASWNYNTNITEENVQNMNNAGDKWSAFLKEQSTLAQMYPLQEIQNLTVKLQLQALQQNGSSVLSEDKSKRLNTILNTMSTIYSTGKVCNPDNPQECLLLEPGLNEIMANSLDYNERLWAWESWRSEVGKQLRPLYEEYVVLKNEMARANHYEDYGDYWRGDYEVNGVDGYDYSRGQLIEDVEHTFEEIKPLYEHLHAYVRAKLMNAYPSYISPIGCLPAHLLGDMWGRFWTNLYSLTVPFGQKPNIDVTDAMVDQAWDAQRIFKEAEKFFVSVGLPNMTQGFWENSMLTDPGNVQKAVCHPTAWDLGKGDFRILMCTKVTMDDFLTAHHEMGHIQYDMAYAAQPFLLRNGANEGFHEAVGEIMSLSAATPKHLKSIGLLSPDFQEDNETEINFLLKQALTIVGTLPFTYMLEKWRWMVFKGEIPKDQWMKKWWEMKREIVGVVEPVPHDETYCDPASLFHVSNDYSFIRYYTRTLYQFQFQEALCQAAKHEGPLHKCDISNSTEAGQKLFNMLRLGKSEPWTLALENVVGAKNMNVRPLLNYFEPLFTWLKDQNKNSFVGWSTDWSPYAD

SEQ ID NO: 438 - protein, 640 aa, Artificial Sequence; identical to SEQ ID NO: 229
  Synthetic

SEQ ID NO: 439 - protein, 867 aa, Artificial Sequence; identical to SEQ ID NO: 230
  Synthetic

SEQ ID NO: 440 - protein, 1197 aa, Artificial Sequence
  Synthetic
QSTIEEQAKTFLDKFNHEAEDLFYQSSLASWNYNTNITEENVQNMNNAGDKWSAFLKEQSTLAQMYPLQEIQNLTVKLQLQALQQNGSSVLSEDKSKRLNTILNTMSTIYSTGKVCNPDNPQECLLLEPGLNEIMANSLDYNERLWAWESWRSEVGKQLRPLYEEYVVLKNEMARANHYEDYGDYWRGDYEVNGVDGYDYSRGQLIEDVEHTFEEIKPLYEHLHAYVRAKLMNAYPSYISPIGCLPAHLLGDMWGRFWTNLYSLTVPFGQKPNIDVTDAMVDQAWDAQRIFKEAEKFFVSVGLPNMTQGFWENSMLTDPGNVQKAVCHPTAWDLGKGDFRILMCTKVTMDDFLTAHHEMGHIQYDMAYAAQPFLLRNGANEGFHEAVGEIMSLSAATPKHLKSIGLLSPDFQEDNETEINFLLKQALTIVGTLPFTYMLEKWRWMVFKGEIPKDQWMKKWWEMKREIVGVVEPVPHDETYCDPASLFHVSNDYSFIRYYTRTLYQFQFQEALCQAAKHEGPLHKCDISNSTEAGQKLFNMLRLGKSEPWTLALENVVGAKNMNVRPLLNYFEPLFTWLKDQNKNSFVGWSTDWSPYADEPKSCDKTHTAPELLGGPSVFLFPPKPKDTLMISRTPEVTCVVVDVSHEDPEVKFNWYVDGVEVHNAKTKPREEQYNSTYRVVSVLTVLHQDWLNGKEYKCKVSNKALPAPIEKTISKAKGQPREPQVYTLPPSRDELTKNQVSLTCLVKGFYPSDIAVEWESNGQPENNYKTTPPVLDSDGSFFLYSKLTVDKSRWQQGNVFSCSVMHEALHNHYTQKSLSLSPGKASTKGPSVFPLAPSSKSTSGGTAALGCLVKDYFPEPVTVSWNSGALTSGVHTFPAVLQSSGLYSLSSVVTVPSSSLGTQTYICNVNHKPSNTKVDKKVEPKSCDKTHTCPPCPAPELLGGPSVFLFPPKPKDTLMISRTPEVTCVVVDVSHEDPEVKFNWYVDGVEVHNAKTKPREEQYNSTYRVVSVLTVLHQDWLNGKEYKCKVSNKALPAPIEKTISKAKGQPREPQVYTLPPSRDELTKNQVSLTCLVKGFYPSDIAVEWESNGQPENNYKTTPPVLDSDGSFFLYSKLTVDKSRWQQGNVFSCSVMHEALHNHYTQKSLSLSPGKKKKPLDGEYFTLQIRGRERFEMFRELNEALELKDAQAGKEPG

SEQ ID NO: 441 - protein, 723 aa, Artificial Sequence
  Synthetic
QSTIEEQAKTFLDKFNHEAEDLFYQSSLASWNYNTNITEENVQNMNNAGDKWSAFLKEQSTLAQMYPLQEIQNLTVKLQLQALQQNGSSVLSEDKSKRLNTILNTMSTIYSTGKVCNPDNPQECLLLEPGLNEIMANSLDYNERLWAWESWRSEVGKQLRPLYEEYVVLKNEMARANHYEDYGDYWRGDYEVNGVDGYDYSRGQLIEDVEHTFEEIKPLYEHLHAYVRAKLMNAYPSYISPIGCLPAHLLGDMWGRFWTNLYSLTVPFGQKPNIDVTDAMVDQAWDAQRIFKEAEKFFVSVGLPNMTQGFWENSMLTDPGNVQKAVCHPTAWDLGKGDFRILMCTKVTMDDFLTAHHEMGHIQYDMAYAAQPFLLRNGANEGFHEAVGEIMSLSAATPKHLKSIGLLSPDFQEDNETEINFLLKQALTIVGTLPFTYMLEKWRWMVFKGEIPKDQWMKKWWEMKREIVGVVEPVPHDETYCDPASLFHVSNDYSFIRYYTRTLYQFQFQEALCQAAKHEGPLHKCDISNSTEAGQKLFNMLRLGKSEPWTLALENVVGAKNMNVRPLLNYFEPLFTWLKDQNKNSFVGWSTDWSPYADQSIKVRISLKSALGDKAYEWNDNEMYLFRSSVAYAMRQYFLKVKNQMILFGEEDVRVANLKPRISFNFFVTAPKNVSDIIPRTEVEKAIRMSRSRINDAFRLNDNSLEFLGIQPTLGPPNQPPVS

SEQ ID NO: 442 - protein, 765 aa, Artificial Sequence
  Synthetic
QSTIEEQAKTFLDKFNHEAEDLFYQSSLASWNYNTNITEENVQNMNNAGDKWSAFLKEQSTLAQMYPLQEIQNLTVKLQLQALQQNGSSVLSEDKSKRLNTILNTMSTIYSTGKVCNPDNPQECLLLEPGLNEIMANSLDYNERLWAWESWRSEVGKQLRPLYEEYVVLKNEMARANHYEDYGDYWRGDYEVNGVDGYDYSRGQLIEDVEHTFEEIKPLYEHLHAYVRAKLMNAYPSYISPIGCLPAHLLGDMWGRFWTNLYSLTVPFGQKPNIDVTDAMVDQAWDAQRIFKEAEKFFVSVGLPNMTQGFWENSMLTDPGNVQKAVCHPTAWDLGKGDFRILMCTKVTMDDFLTAHHEMGHIQYDMAYAAQPFLLRNGANEGFHEAVGEIMSLSAATPKHLKSIGLLSPDFQEDNETEINFLLKQALTIVGTLPFTYMLEKWRWMVFKGEIPKDQWMKKWWEMKREIVGVVEPVPHDETYCDPASLFHVSNDYSFIRYYTRTLYQFQFQEALCQAAKHEGPLHKCDISNSTEAGQKLFNMLRLGKSEPWTLALENVVGAKNMNVRPLLNYFEPLFTWLKDQNKNSFVGWSTDWSPYADQSIKVRISLKSALGDKAYEWNDNEMYLFRSSVAYAMRQYFLKVKNQMILFGEEDVRVANLKPRISFNFFVTAPKNVSDIIPRTEVEKAIRMSRSRINDAFRLNDNSLEFLGIQPTLGPPNQPPVSKKKPLDGEYFTLQIRGRERFEMFRELNEALELKDAQAGKEPG

SEQ ID NO: 443 - protein, 992 aa, Artificial Sequence
  Synthetic
QSTIEEQAKTFLDKFNHEAEDLFYQSSLASWNYNTNITEENVQNMNNAGDKWSAFLKEQSTLAQMYPLQEIQNLTVKLQLQALQQNGSSVLSEDKSKRLNTILNTMSTIYSTGKVCNPDNPQECLLLEPGLNEIMANSLDYNERLWAWESWRSEVGKQLRPLYEEYVVLKNEMARANHYEDYGDYWRGDYEVNGVDGYDYSRGQLIEDVEHTFEEIKPLYEHLHAYVRAKLMNAYPSYISPIGCLPAHLLGDMWGRFWTNLYSLTVPFGQKPNIDVTDAMVDQAWDAQRIFKEAEKFFVSVGLPNMTQGFWENSMLTDPGNVQKAVCHPTAWDLGKGDFRILMCTKVTMDDFLTAHHEMGHIQYDMAYAAQPFLLRNGANEGFHEAVGEIMSLSAATPKHLKSIGLLSPDFQEDNETEINFLLKQALTIVGTLPFTYMLEKWRWMVFKGEIPKDQWMKKWWEMKREIVGVVEPVPHDETYCDPASLFHVSNDYSFIRYYTRTLYQFQFQEALCQAAKHEGPLHKCDISNSTEAGQKLFNMLRLGKSEPWTLALENVVGAKNMNVRPLLNYFEPLFTWLKDQNKNSFVGWSTDWSPYADQSIKVRISLKSALGDKAYEWNDNEMYLFRSSVAYAMRQYFLKVKNQMILFGEEDVRVANLKPRISFNFFVTAPKNVSDIIPRTEVEKAIRMSRSRINDAFRLNDNSLEFLGIQPTLGPPNQPPVSEPKSCDKTHTAPELLGGPSVFLFPPKPKDTLMISRTPEVTCVVVDVSHEDPEVKFNWYVDGVEVHNAKTKPREEQYNSTYRVVSVLTVLHQDWLNGKEYKCKVSNKALPAPIEKTISKAKGQPREPQVYTLPPSRDELTKNQVSLTCLVKGFYPSDIAVEWESNGQPENNYKTTPPVLDSDGSFFLYSKLTVDKSRWQQGNVFSCSVMHEALHNHYTQKSLSLSPGKKKKPLDGEYFTLQIRGRERFEMFRELNEALELKDAQAGKEPG

SEQ ID NO: 444 - protein, 1095 aa, Artificial Sequence
  Synthetic
QSTIEEQAKTFLDKFNHEAEDLFYQSSLASWNYNTNITEENVQNMNNAGDKWSAFLKEQSTLAQMYPLQEIQNLTVKLQLQALQQNGSSVLSEDKSKRLNTILNTMSTIYSTGKVCNPDNPQECLLLEPGLNEIMANSLDYNERLWAWESWRSEVGKQLRPLYEEYVVLKNEMARANHYEDYGDYWRGDYEVNGVDGYDYSRGQLIEDVEHTFEEIKPLYEHLHAYVRAKLMNAYPSYISPIGCLPAHLLGDMWGRFWTNLYSLTVPFGQKPNIDVTDAMVDQAWDAQRIFKEAEKFFVSVGLPNMTQGFWENSMLTDPGNVQKAVCHPTAWDLGKGDFRILMCTKVTMDDFLTAHHEMGHIQYDMAYAAQPFLLRNGANEGFHEAVGEIMSLSAATPKHLKSIGLLSPDFQEDNETEINFLLKQALTIVGTLPFTYMLEKWRWMVFKGEIPKDQWMKKWWEMKREIVGVVEPVPHDETYCDPASLFHVSNDYSFIRYYTRTLYQFQFQEALCQAAKHEGPLHKCDISNSTEAGQKLFNMLRLGKSEPWTLALENVVGAKNMNVRPLLNYFEPLFTWLKDQNKNSFVGWSTDWSPYADQSIKVRISLKSALGDKAYEWNDNEMYLFRSSVAYAMRQYFLKVKNQMILFGEEDVRVANLKPRISFNFFVTAPKNVSDIIPRTEVEKAIRMSRSRINDAFRLNDNSLEFLGIQPTLGPPNQPPVSASTKGPSVFPLAPSSKSTSGGTAALGCLVKDYFPEPVTVSWNSGALTSGVHTFPAVLQSSGLYSLSSVVTVPSSSLGTQTYICNVNHKPSNTKVDKKVEPKSCDKTHTCPPCPAPELLGGPSVFLFPPKPKDTLMISRTPEVTCVVVDVSHEDPEVKFNWYVDGVEVHNAKTKPREEQYNSTYRVVSVLTVLHQDWLNGKEYKCKVSNKALPAPIEKTISKAKGQPREPQVYTLPPSRDELTKNQVSLTCLVKGFYPSDIAVEWESNGQPENNYKTTPPVLDSDGSFFLYSKLTVDKSRWQQGNVFSCSVMHEALHNHYTQKSLSLSPGKKKKPLDGEYFTLQIRGRERFEMFRELNEALELKDAQAGKEPG

SEQ ID NO: 445 - protein, 165 aa, Artificial Sequence
  Synthetic
TYKLILNGKTLKGETTTEAVDAATAEKVFKQYANDNGVDGEWTYDDATKTFTVTETYKLVINGKTLKGETTTEAVDAATAEKVFKQYANDNGVDGEWTYDDATKTFTVTETYKLVINGKTLKGETTTKAVDAETAEKAFKQYANDNGVDGVWTYDDATKTFTVTE

SEQ ID NO: 446 - protein, 55 aa, Artificial Sequence
  Synthetic
TYKLILNGKTLKGETTTEAVDAATAEKVFKQYANDNGVDGEWTYDDATKTFTVTE

SEQ ID NO: 447 - protein, 110 aa, Artificial Sequence
  Synthetic
TYKLILNGKTLKGETTTEAVDAATAEKVFKQYANDNGVDGEWTYDDATKTFTVTETYKLILNGKTLKGETTTEAVDAATAEKVFKQYANDNGVDGEWTYDDATKTFTVTE

SEQ ID NO: 448 - protein, 165 aa, Artificial Sequence
  Synthetic
TYKLILNGKTLKGETTTEAVDAATAEKVFKQYANDNGVDGEWTYDDATKTFTVTETYKLILNGKTLKGETTTEAVDAATAEKVFKQYANDNGVDGEWTYDDATKTFTVTETYKLILNGKTLKGETTTEAVDAATAEKVFKQYANDNGVDGEWTYDDATKTFTVTE

SEQ ID NO: 449 - protein, 55 aa, Artificial Sequence
  Synthetic
TYKLVINGKTLKGETTTEAVDAATAEKVFKQYANDNGVDGEWTYDDATKTFTVTE

SEQ ID NO: 450 - protein, 110 aa, Artificial Sequence
  Synthetic
TYKLVINGKTLKGETTTEAVDAATAEKVFKQYANDNGVDGEWTYDDATKTFTVTETYKLVINGKTLKGETTTEAVDAATAEKVFKQYANDNGVDGEWTYDDATKTFTVTE

SEQ ID NO: 451 - protein, 165 aa, Artificial Sequence
  Synthetic
TYKLVINGKTLKGETTTEAVDAATAEKVFKQYANDNGVDGEWTYDDATKTFTVTETYKLVINGKTLKGETTTEAVDAATAEKVFKQYANDNGVDGEWTYDDATKTFTVTETYKLVINGKTLKGETTTEAVDAATAEKVFKQYANDNGVDGEWTYDDATKTFTVTE

SEQ ID NO: 452 - protein, 291 aa, Artificial Sequence
  Synthetic
AQHDEAQQNAFYQVLNMPNLNADQRNGFIQSLKDDPSQSANVLGEAQKLNDSQAPKADAQQNKFNKDQQSAFYEILNMPNLNEEQRNGFIQSLKDDPSQSTNVLGEAKKLNESQAPKADNNFNKEQQNAFYEILNMPNLNEEQRNGFIQSLKDDPSQSANLLAEAKKLNESQAPKADNKFNKEQQNAFYEILHLPNLNEEQRNGFIQSLKDDPSQSANLLAEAKKLNDAQAPKADNKFNKEQQNAFYEILHLPNLTEEQRNGFIQSLKDDPSVSKEILAEAKKLNDAQAPK

SEQ ID NO: 453 - protein, 61 aa, Artificial Sequence
  Synthetic
ADAQQNKFNKDQQSAFYEILNMPNLNEEQRNGFIQSLKDDPSQSTNVLGEAKKLNESQAPK

SEQ ID NO: 454 - protein, 122 aa, Artificial Sequence
  Synthetic
ADAQQNKFNKDQQSAFYEILNMPNLNEEQRNGFIQSLKDDPSQSTNVLGEAKKLNESQAPKADAQQNKFNKDQQSAFYEILNMPNLNEEQRNGFIQSLKDDPSQSTNVLGEAKKLNESQAPK

SEQ ID NO: 455 - protein, 244 aa, Artificial Sequence
  Synthetic
ADAQQNKFNKDQQSAFYEILNMPNLNEEQRNGFIQSLKDDPSQSTNVLGEAKKLNESQAPKADAQQNKFNKDQQSAFYEILNMPNLNEEQRNGFIQSLKDDPSQSTNVLGEAKKLNESQAPKADAQQNKFNKDQQSAFYEILNMPNLNEEQRNGFIQSLKDDPSQSTNVLGEAKKLNESQAPKADAQQNKFNKDQQSAFYEILNMPNLNEEQRNGFIQSLKDDPSQSTNVLGEAKKLNESQAPK

SEQ ID NO: 456 - protein, 365 aa, Artificial Sequence
  Synthetic
KEETPETPETDSEEEVTIKANLIFANGSTQTAEFKGTFEKATSEAYAYADTLKKDNGEYTVDVADKGYTLNIKFAGKEKTPEEPKEEVTIKANLIYADGKTQTAEFKGTFEEATAEAYRYADALKKDNGEYTVDVADKGYTLNIKFAGKEKTPEEPKEEVTIKANLIYADGKTQTAEFKGTFEEATAEAYRYADLLAKENGKYTVDVADKGYTLNIKFAGKEKTPEEPKEEVTIKANLIYADGKTQTAEFKGTFAEATAEAYRYADLLAKENGKYTADLEDGGYTINIRFAGKKVDEKPEEKEQVTIKENIYFEDGTVQTATFKGTFAEATAEAYRYADLLSKEHGKYTADLEDGGYTINIRFAG

SEQ ID NO: 457 - protein, 72 aa, Artificial Sequence
  Synthetic
KEKTPEEPKEEVTIKANLIYADGKTQTAEFKGTFAEATAEAYRYADLLAKENGKYTADLEDGGYTINIRFAG

SEQ ID NO: 458 - protein, 144 aa, Artificial Sequence
  Synthetic
KEKTPEEPKEEVTIKANLIYADGKTQTAEFKGTFAEATAEAYRYADLLAKENGKYTADLEDGGYTINIRFAGKEKTPEEPKEEVTIKANLIYADGKTQTAEFKGTFAEATAEAYRYADLLAKENGKYTADLEDGGYTINIRFAG

SEQ ID NO: 459 - protein, 216 aa, Artificial Sequence
  Synthetic
KEKTPEEPKEEVTIKANLIYADGKTQTAEFKGTFAEATAEAYRYADLLAKENGKYTADLEDGGYTINIRFAGKEKTPEEPKEEVTIKANLIYADGKTQTAEFKGTFAEATAEAYRYADLLAKENGKYTADLEDGGYTINIRFAGKEKTPEEPKEEVTIKANLIYADGKTQTAEFKGTFAEATAEAYRYADLLAKENGKYTADLEDGGYTINIRFAG

SEQ ID NO: 460 - protein, 116 aa, Artificial Sequence
  Synthetic
TYKLILNGKTLKGETTTEAVDAATAEKVFKQYANDNGVDGEWTYDDATKTFTVTEADAQQNKFNKDQQSAFYEILNMPNLNEEQRNGFIQSLKDDPSQSTNVLGEAKKLNESQAPK

SEQ ID NO: 461 - protein, 127 aa, Artificial Sequence
  Synthetic
TYKLILNGKTLKGETTTEAVDAATAEKVFKQYANDNGVDGEWTYDDATKTFTVTEKEKTPEEPKEEVTIKANLIYADGKTQTAEFKGTFAEATAEAYRYADLLAKENGKYTADLEDGGYTINIRFAG

SEQ ID NO: 462 - protein, 116 aa, Artificial Sequence
  Synthetic
TYKLVINGKTLKGETTTEAVDAATAEKVFKQYANDNGVDGEWTYDDATKTFTVTEADAQQNKFNKDQQSAFYEILNMPNLNEEQRNGFIQSLKDDPSQSTNVLGEAKKLNESQAPK

SEQ ID NO: 463 - protein, 127 aa, Artificial Sequence
  Synthetic
TYKLVINGKTLKGETTTEAVDAATAEKVFKQYANDNGVDGEWTYDDATKTFTVTEKEKTPEEPKEEVTIKANLIYADGKTQTAEFKGTFAEATAEAYRYADLLAKENGKYTADLEDGGYTINIRFAG

SEQ ID NO: 464 - protein, 133 aa, Artificial Sequence
  Synthetic
KEKTPEEPKEEVTIKANLIYADGKTQTAEFKGTFAEATAEAYRYADLLAKENGKYTADLEDGGYTINIRFAGADAQQNKFNKDQQSAFYEILNMPNLNEEQRNGFIQSLKDDPSQSTNVLGEAKKLNESQAPK

SEQ ID NO: 465 - protein, 188 aa, Artificial Sequence
  Synthetic
TYKLILNGKTLKGETTTEAVDAATAEKVFKQYANDNGVDGEWTYDDATKTFTVTEADAQQNKFNKDQQSAFYEILNMPNLNEEQRNGFIQSLKDDPSQSTNVLGEAKKLNESQAPKKEKTPEEPKEEVTIKANLIYADGKTQTAEFKGTFAEATAEAYRYADLLAKENGKYTADLEDGGYTINIRFAG

SEQ ID NO: 466 - protein, 188 aa, Artificial Sequence
  Synthetic
TYKLVINGKTLKGETTTEAVDAATAEKVFKQYANDNGVDGEWTYDDATKTFTVTEADAQQNKFNKDQQSAFYEILNMPNLNEEQRNGFIQSLKDDPSQSTNVLGEAKKLNESQAPKKEKTPEEPKEEVTIKANLIYADGKTQTAEFKGTFAEATAEAYRYADLLAKENGKYTADLEDGGYTINIRFAG

SEQ ID NO: 467 - protein, 129 aa, Artificial Sequence
  Synthetic
QVQLQESGGGLVQAGGSLRLSCAVSGNTLSRYAMGWFRQTPGNEREFVAAIRWNNGATYYADSVEGRFTISRDSGKNTVYLQMNNLQPEDTAVYYCAGRFLGYASSNAYHEALYNYDYWGQGTQVTVSS

SEQ ID NO: 468 - protein, 258 aa, Artificial Sequence
  Synthetic
QVQLQESGGGLVQAGGSLRLSCAVSGNTLSRYAMGWFRQTPGNEREFVAAIRWNNGATYYADSVEGRFTISRDSGKNTVYLQMNNLQPEDTAVYYCAGRFLGYASSNAYHEALYNYDYWGQGTQVTVSSQVQLQESGGGLVQAGGSLRLSCAVSGNTLSRYAMGWFRQTPGNEREFVAAIRWNNGATYYADSVEGRFTISRDSGKNTVYLQMNNLQPEDTAVYYCAGRFLGYASSNAYHEALYNYDYWGQGTQVTVSS

SEQ ID NO: 469 - protein, 15 aa, Artificial Sequence
  Synthetic
KPEVIDASELTPAVT

SEQ ID NO: 470 - protein, 5 aa, Artificial Sequence
  Synthetic
DDAKK

SEQ ID NO: 471 - protein, 10 aa, Artificial Sequence
  Synthetic
DDAKKDDAKK

SEQ ID NO: 472 - protein, 15 aa, Artificial Sequence
  Synthetic
DDAKKDDAKKDDAKK

SEQ ID NO: 473 - protein, 20 aa, Artificial Sequence
  Synthetic
DDAKKDDAKKDDAKKDDAKK

SEQ ID NO: 474 - protein, 25 aa, Artificial Sequence
  Synthetic
DDAKKDDAKKDDAKKDDAKKDDAKK

SEQ ID NO: 475 - protein, 30 aa, Artificial Sequence
  Synthetic
DDAKKDDAKKDDAKKDDAKKDDAKKDDAKK

SEQ ID NO: 476 - protein, 2 aa, Artificial Sequence
  Synthetic
GS

SEQ ID NO: 477 - protein, 4 aa, Artificial Sequence
  Synthetic
GGGS

SEQ ID NO: 478 - protein, 6 aa, Artificial Sequence
  Synthetic
SGGGGS

SEQ ID NO: 479 - protein, 8 aa, Artificial Sequence
  Synthetic
GGSGGGGS

SEQ ID NO: 480 - protein, 12 aa, Artificial Sequence
  Synthetic
GGGGGGSGGGGS

SEQ ID NO: 481 - protein, 5 aa, Artificial Sequence
  Synthetic
GGGGS

SEQ ID NO: 482 - protein, 10 aa, Artificial Sequence
  Synthetic
GGGGSGGGGS

SEQ ID NO: 483 - protein, 15 aa, Artificial Sequence
  Synthetic
GGGGSGGGGSGGGGS

SEQ ID NO: 484 - protein, 4 aa, Artificial Sequence
  Synthetic
VPGV

SEQ ID NO: 485 - protein, 5 aa, Artificial Sequence
  Synthetic
VPGVG

SEQ ID NO: 486 - protein, 6 aa, Artificial Sequence
  Synthetic
GVPGVG

SEQ ID NO: 487 - protein, 8 aa, Artificial Sequence
  Synthetic
GVGVPGVG

SEQ ID NO: 488 - protein, 10 aa, Artificial Sequence
  Synthetic
VPGVGVPGVG

SEQ ID NO: 489 - protein, 232 aa, Artificial Sequence
  Synthetic
EPKSCDKTHTCPPCPAPELLGGPSVFLFPPKPKDTLMISRTPEVTCVVVDVSHEDPEVKFNWYVDGVEVHNAKTKPREEQYNSTYRVVSVLTVLHQDWLNGKEYKCKVSNKALPAPIEKTISKAKGQPREPQVYTLPPSRDELTKNQVSLTCLVKGFYPSDIAVEWESNGQPENNYKTTPPVLDSDGSFFLYSKLTVDKSRWQQGNVFSCSVMHEALHNHYTQKSLSLSPGK

SEQ ID NO: 490 - protein, 274 aa, Artificial Sequence
  Synthetic
EPKSCDKTHTCPPCPAPELLGGPSVFLFPPKPKDTLMISRTPEVTCVVVDVSHEDPEVKFNWYVDGVEVHNAKTKPREEQYNSTYRVVSVLTVLHQDWLNGKEYKCKVSNKALPAPIEKTISKAKGQPREPQVYTLPPSRDELTKNQVSLTCLVKGFYPSDIAVEWESNGQPENNYKTTPPVLDSDGSFFLYSKLTVDKSRWQQGNVFSCSVMHEALHNHYTQKSLSLSPGKKKKPLDGEYFTLQIRGRERFEMFRELNEALELKDAQAGKEPG

SEQ ID NO: 491 - protein, 232 aa, Artificial Sequence; identical to SEQ ID NO: 489
  Synthetic

SEQ ID NO: 492 - protein, 372 aa, Artificial Sequence
  Synthetic
ASTKGPSVFPLAPSSKSTSGGTAALGCLVKDYFPEPVTVSWNSGALTSGVHTFPAVLQSSGLYSLSSVVTVPSSSLGTQTYICNVNHKPSNTKVDKKVEPKSCDKTHTCPPCPAPELLGGPSVFLFPPKPKDTLMISRTPEVTCVVVDVSHEDPEVKFNWYVDGVEVHNAKTKPREEQYNSTYRVVSVLTVLHQDWLNGKEYKCKVSNKALPAPIEKTISKAKGQPREPQVYTLPPSRDELTKNQVSLTCLVKGFYPSDIAVEWESNGQPENNYKTTPPVLDSDGSFFLYSKLTVDKSRWQQGNVFSCSVMHEALHNHYTQKSLSLSPGKKKKPLDGEYFTLQIRGRERFEMFRELNEALELKDAQAGKEPG

SEQ ID NO: 493 - protein, 107 aa, Artificial Sequence [sequence omitted]

SEQ ID NO: 494 - protein, 106 aa, Artificial Sequence
  Synthetic
GQPKAAPSVTLFPPSSEELQANKATLVCLISDFYPGAVTVAWKADSSPVKAGVETTTPSKQSNNKYAASSYLSLTPEQWKSHRSYSCQVTHEGSTVEKTVAPTECS

SEQ ID NO: 495 - protein, 150 aa, Artificial Sequence
  Synthetic
ASTKGPSVFPLAPSSKSTSGGTAALGCLVKDYFPEPVTVSWNSGALTSGVHTFPAVLQSSGLYSLSSVVTVPSSSLGTQTYICNVNHKPSNTKVDKKVEPKSCDKTHTKKKPLDGEYFTLQIRGRERFEMFRELNEALELKDAQAGKEPG

SEQ ID NO: 496 - protein, 367 aa, Artificial Sequence
  Synthetic
ASTKGPSVFPLAPSSKSTSGGTAALGCLVKDYFPEPVTVSWNSGALTSGVHTFPAVLQSSGLYSLSSVVTVPSSSLGTQTYICNVNHKPSNTKVDKKVEPKSCDKTHTAPELLGGPSVFLFPPKPKDTLMISRTPEVTCVVVDVSHEDPEVKFNWYVDGVEVHNAKTKPREEQYNSTYRVVSVLTVLHQDWLNGKEYKCKVSNKALPAPIEKTISKAKGQPREPQVYTLPPSRDELTKNQVSLTCLVKGFYPSDIAVEWESNGQPENNYKTTPPVLDSDGSFFLYSKLTVDKSRWQQGNVFSCSVMHEALHNHYTQKSLSLSPGKKKKPLDGEYFTLQIRGRERFEMFRELNEALELKDAQAGKEPG

SEQ ID NO: 497 - protein, 64 aa, Artificial Sequence
  Synthetic
EPKSCDKTHTCPPCPAPELLGGKKKPLDGEYFTLQIRGRERFEMFRELNEALELKDAQAGKEPG

SEQ ID NO: 498 - protein, 162 aa, Artificial Sequence
  Synthetic
ASTKGPSVFPLAPSSKSTSGGTAALGCLVKDYFPEPVTVSWNSGALTSGVHTFPAVLQSSGLYSLSSVVTVPSSSLGTQTYICNVNHKPSNTKVDKKVEPKSCDKTHTCPPCPAPELLGGKKKPLDGEYFTLQIRGRERFEMFRELNEALELKDAQAGKEPG

SEQ ID NO: 499 - protein, 269 aa, Artificial Sequence
  Synthetic
EPKSCDKTHTAPELLGGPSVFLFPPKPKDTLMISRTPEVTCVVVDVSHEDPEVKFNWYVDGVEVHNAKTKPREEQYNSTYRVVSVLTVLHQDWLNGKEYKCKVSNKALPAPIEKTISKAKGQPREPQVYTLPPSRDELTKNQVSLTCLVKGFYPSDIAVEWESNGQPENNYKTTPPVLDSDGSFFLYSKLTVDKSRWQQGNVFSCSVMHEALHNHYTQKSLSLSPGKKKKPLDGEYFTLQIRGRERFEMFRELNEALELKDAQAGKEPG

SEQ ID NO: 500 - protein, 33 aa, Artificial Sequence
  Synthetic
ALNCYWPLNDYGFYTTTGIGYQPYRVVVLSFEL

SEQ ID NO: 501 - protein, 31 aa, Artificial Sequence
  Synthetic
EEQAKTFLDKFNHEAEDLFYQSSGLGKGDFR

SEQ ID NO: 502 - protein, 39 aa, Homo sapiens
KKKPLDGEYFTLQIRGRERFEMFRELNEALELKDAQAGK

SEQ ID NO: 503 - protein, 38 aa, Mus musculus
KKKPLDGEYFTLKIRGRKRFEMFRELNEALELKDAHAT

SEQ ID NO: 504 - protein, 38 aa, Rattus rattus
KKKPLDGEYFTLKIRGRERFEMFRELNEALELKDARAA

SEQ ID NO: 505 - protein, 39 aa, Canis lupus familiaris
KKKPLDGEYFTLQIRGRERYEMFRNLNEALELKDAQSGK

SEQ ID NO: 506 - protein, 39 aa, Felis catus
KKKPLDGEYFTLQIRGRERFEMFRELNEALELKDAQSGK

SEQ ID NO: 507 - protein, 39 aa, Equus caballus
KKKPLDGEYFTLQIRGRERFEMFRELNEALELKDAQTGK

SEQ ID NO: 508 - protein, 14 aa, Artificial Sequence
  Synthetic
DYKDDDDKHHHHHH

SEQ ID NO: 509 - protein, 19 aa, Artificial Sequence
  Synthetic
  VARIANT (15)..(16): Xaa can be any naturally occurring amino acid
DYKDDDDKHHHHHHXXAAA

1. A protein multimer comprising 4 copies of a binding site, wherein the binding site is capable of binding to a virus spike protein of a coronavirus.

2. The multimer of claim 1, wherein said virus is a first virus and the multimer is capable of binding to a second coronavirus, wherein the first and second viruses are different virus strains; optionally wherein the viruses are different SARS-CoV-2 strains.

3. The multimer of claim 2, wherein the viruses have different forms of virus spike proteins and the multimer is capable of binding to the spike proteins.

4. The multimer of any preceding claim, wherein the binding site is an antibody single variable domain.

5. The multimer of any preceding claim,wherein the binding site is
a) an antigen binding site that is capable of binding to a SARS-CoV-2 spike glycoprotein; or
b) an ACE2 or TMPRSS2 peptide.

6. The multimer of any preceding claim, wherein the binding site is capable of binding to the inner face of the RBD (receptor-binding domain) of SARS-CoV-2 spike.

7. The multimer of any preceding claim
a) wherein the binding site comprises (i) an antibody VH domain comprising the SEQ ID NO: 307 or (ii) an antibody VH domain that comprises an amino acid sequence that is at least 70% identical to SEQ ID NO: 307 or that competes in an in vitro competition assay with the antibody VH domain of (i) for binding to SARS-CoV-2 spike;
b) comprising 4 copies of an antigen binding site of an antibody, wherein the antibody is selected from a VH domain comprising the amino acid sequence of SEQ ID NO: 288 (or an antibody variable domain comprising an amino acid sequence that is at least 80% identical to SEQ ID NO: 288), REGN10987, REGN10933 and CB6; or
c) comprising 4 copies of an antigen binding site of an antibody, wherein the multimer comprises a dimer of the antibody, wherein the antibody is selected from REGN10987, REGN10933 and CB6.

8. The multimer of any preceding claim, wherein the multimer comprises at least 4 copies of a polypeptide, wherein the polypeptide comprises a self-assembly multimerization domain (SAM) (optionally a tetramerization domain, TD) and one or more copies of the antigen binding site.

9. The multimer of any one of claims 1-7, wherein the multimer is a protein dimer comprising 2 copies of
a) the polypeptide defined in claim 8, optionally wherein the polypeptide comprises (in N- to C-terminal direction) BD-BD-SAM, wherein BD is the binding site; or
b) a polypeptide comprising one or more copies of the binding site and an antibody Fc region, wherein the multimer is a dimer and the Fc regions of the 2 polypeptide copies are associated together in the dimer.

10. The multimer of claim 9, wherein the multimer comprises
a) a first polypeptide comprising, in N- to C-terminal direction, BD-hinge-TD; BD-optional linker-BD-Hinge-TD; or BD-optional linker-CH1-Hinge-TD; or
b) a TD and one or more copies of BD, the polypeptide comprising, in N- to C-terminal direction
(i) BD-TD;
(ii) TD-BD;
(iii) BD-BD-TD;
(iv) TD-BD-BD;
(v) BD-TD-BD-BD;
(vi) BD-BD-TD-BD; or
(vii) BD-BD-TD-BD-BD.

11. The multimer of any preceding claim, wherein the binding of the multimer (first multimer) to the first virus spike protein is stronger than the binding of a second multimer to the first virus spike protein, wherein the second multimer comprises 2 (but no more than 2) copies of said binding site and wherein
a) the first multimer binds to the first virus spike protein with an OD₄₅₀ from 1 to 3 in an ELISA assay in which the spike protein is at a concentration of 1 nM in the assay (and optionally the second multimer binds to the first virus spike protein with an OD₄₅₀ less than 0.5 in an ELISA assay in which the spike protein is at a concentration of 1 nM in the assay);
b) the first multimer (i) binds to a first virus spike protein trimer with an OD₄₅₀ from 2 to 3 in an ELISA assay in which the spike protein is at a concentration of 1 nM in the assay and (ii) binds to a first virus spike protein monomer with an OD₄₅₀ from 1 to 2 in an ELISA assay in which the spike protein is at a concentration of 1 nM in the assay; and/or
c) the first multimer binds to the first virus spike protein with an OD₄₅₀ from 2 to 3 in an ELISA assay in which the spike protein is at a concentration of 10 nM in the assay (and optionally the second multimer binds to the first virus spike protein with an OD₄₅₀ from 1 to 2 in an ELISA assay in which the spike protein is at a concentration of 10 nM in the assay).

12. The multimer of any preceding claim, wherein the multimer comprises 6 copies of the binding site.

13. An inhalable pharmaceutical composition comprising a multimer of any preceding claim, optionally wherein the composition is a nebulised composition.

14. The composition of claim 13, wherein
(i) the composition comprises particles of the multimer and
(a) at least 20% of multimer particles are in the size range >4.7 µm, and optionally no more than 5.0 µm; and
(b) at least 50% of multimer particles are in the size range <4.7 µm, and optionally at least 15% of multimer particles are in the size range <1.0 um; or
(ii) the composition comprises particles of the multimer and the median mass aerodynamic particle diameter (MMAD) is 3 to 3.5 µm.

15. The composition of claim 13 or 14 further comprising an anti-inflammatory medicament.

16. An inhalation device (optionally a nebuliser or inhaler) comprising the composition of any of claims 13 to 15.

17. A mixture of at least 2 different multimers as recited in any one of claims 1-12, wherein a first of said multimers comprises 4 copies of an antigen binding site that is capable of binding to a first spike antigen; and a second of said multimers comprises 4 copies of an antigen binding site that is capable of binding to a second spike antigen, and the antigens are different.

18. A method of expanding the antigen binding specificity of a binding site, wherein the binding site binds or neutralises a first antigen, but not a second antigen when the binding site is comprised in monovalent form by a protein that specifically binds to the first antigen, the method comprising providing a plurality of copies of a polypeptide, and multimerising at least 4 of the polypeptides to produce a multimer comprising at least 4 copies of the polypeptide, wherein the polypeptide comprises one, two or more copies of the binding site, whereby binding sites of the multimer are capable of binding the first and second antigens; optionally wherein the multimer is according to any one of claims 1-12.

19. A multimer obtainable by the method of any one of claims 18 wherein the multimer is for targeting a virus whose antigens evolve through mutation during viral infection of a human subject, optionally for treating a coronavirus infection.

20. A pharmaceutical composition comprising a multimer of any one of claims 1-12 and 19, optionally wherein the composition is comprised by a sterile medical container or device, such as a syringe, vial, inhaler or injection device.

21. The multimer or composition of any one of claims 1-12, 19 and 20 for use as a medicament, optionally for treating or preventing viral pneumonia in a human or animal subject, such as wherein the subject is suffering from or is at risk of suffering from a coronavirus infection.

22. A method of binding multiple copies of an antigen, the method comprising combining the copies with a multimer or composition of claims 1-12, 19 and 21, wherein the copies are bound by the multimer, and optionally the method comprising isolating the multimer bound to the antigen copies.

23. A method of detecting the presence of anti-first antigen antibodies in a bodily fluid sample of a human or animal, the method comprising carrying out an ELISA assay, wherein the assay comprises
a) Optionally diluting the serum sample from 10 to 10⁶-fold;
b) contacting the first antigen with the sample (optionally which has been diluted in step (a)) whereby anti-first antigen antibodies present in the sample bind to the first antigen (eg, spike protein) to produce antigen/antibody complexes; and
c) contacting and binding the first antigen or anti-first antigen antibodies with copies of the multimer defined in one of claims 1-12, 19 and 21; and
d) detecting multimer bound to antigen/antibody complexes, such as by determining optical density;
wherein the steps can be carried out in the order (a) (b) (c) and (d) or (a) (c) (b) and (d), or wherein steps (b) and (c) are carried out simultaneously and between steps (a) and (d).

24. A method for detecting the presence of an antigen in a sample, the method comprising combining the sample with a multimer as defined in one of claims 1-12, 19 and 21, allowing antigen in the sample to bind multimers to form antigen/multimer complexes and detecting antigen/multimer complexes.

25. A method of expanding a utility of an antigen binding site, the method comprising producing a multimer as defined in one of claims 1-12, 19 and 21, wherein the multimer comprises at least 4 copies of the binding site.

26. A method for the treatment or prevention of a disease or condition in a human or animal subject), the method comprising administering to the subject a plurality of multimers as defined in one of claims 1-12, 19 and 21.

27. A multimer according to any one of claims 1-12, 19 and 21 that is capable of binding to different forms of a virus spike protein for treating, preventing or reducing in a human or animal infection by a virus comprising a first form of spike protein, and for treating, preventing or reducing infection by a virus comprising a second form of the spike protein.

28. A multimer according to any one of claims 1-12, 19 and 21 that is capable of binding to different forms of a virus spike protein for treating or preventing or reducing a seasonal viral infection in a human or animal.

29. A medicament for administration to a human or animal subject for treating or preventing a seasonal virus, wherein the medicament comprises a plurality of multimers according to any one of claims 1-12, 19 and 21, wherein the medicament comprises a pharmaceutically acceptable diluent, carrier or excipient.

30. The medicament of claim 29, wherein the medicament is a multi-seasonal anti-viral medicament comprising a plurality of said multimers, wherein the multimers are capable of binding to first and second strains of the virus, wherein the strains differ in a surface-exposed antigen (optionally spike) to which the multimers can bind.

31. A multimer according to any one of claims 1-12, 19 and 21 for use in a method for reducing the first virus in an animal to reduce a zoonotic population of viruses that are transmissible to humans, wherein the viruses are capable of causing a disease or condition (or death) in humans.

32. The multimer or medicament of any one of claims 27-31, wherein each virus is a SARS virus, optionally SARS-Cov, SARS-Cov-2 or MERS-Cov.
